United States Patent Application Publication US 2021/0196806 A1 - sequence listing, part 2

SEQ ID NO: 17683 - protein, 10 aa, Homo sapiens
  Table A; HLA-A*29:02; CTNNB1; D32Y; 1
SHWQQQSYLY

SEQ ID NO: 17684 - protein, 9 aa, Homo sapiens
  Table A; HLA-A*02:04; PIK3R1; K567E; 0
SIEPDLIQL

SEQ ID NO: 17685 - protein, 9 aa, Homo sapiens
  Table A; HLA-A*02:06; PIK3R1; K567E; 0
SIEPDLIQL

SEQ ID NO: 17686 - protein, 9 aa, Homo sapiens
  Table A; HLA-A*02:07; PIK3R1; K567E; 0
SIEPDLIQL

SEQ ID NO: 17687 - protein, 9 aa, Homo sapiens
  Table A; HLA-B*35:02; PIK3R1; K567E; 0
SIEPDLIQL

SEQ ID NO: 17688 - protein, 9 aa, Homo sapiens
  Table A; HLA-B*35:03; PIK3R1; K567E; 0
SIEPDLIQL

SEQ ID NO: 17689 - protein, 9 aa, Homo sapiens
  Table A; HLA-B*35:12; PIK3R1; K567E; 0
SIEPDLIQL

SEQ ID NO: 17690 - protein, 9 aa, Homo sapiens
  Table A; HLA-B*38:01; PIK3R1; K567E; 0
SIEPDLIQL

SEQ ID NO: 17691 - protein, 9 aa, Homo sapiens
  Table A; HLA-C*05:01; PIK3R1; K567E; 1
SIEPDLIQL

SEQ ID NO: 17692 - protein, 9 aa, Homo sapiens
  Table A; HLA-C*08:01; PIK3R1; K567E; 0
SIEPDLIQL

SEQ ID NO: 17693 - protein, 9 aa, Homo sapiens
  Table A; HLA-C*08:02; PIK3R1; K567E; 0
SIEPDLIQL

SEQ ID NO: 17694 - protein, 10 aa, Homo sapiens
  Table A; HLA-A*33:03; PIK3R1; K567E; 0
SIEPDLIQLR

SEQ ID NO: 17695 - protein, 10 aa, Homo sapiens
  Table A; HLA-A*68:01; PIK3R1; K567E; 0
SIEPDLIQLR

SEQ ID NO: 17696 - protein, 10 aa, Homo sapiens
  Table A; HLA-B*27:02; PIK3R1; K567E; 0
SIEPDLIQLR

SEQ ID NO: 17697 - protein, 11 aa, Homo sapiens
  Table A; HLA-A*11:01; PIK3R1; K567E; 1
SIEPDLIQLRK

SEQ ID NO: 17698 - protein, 10 aa, Homo sapiens
  Table A; HLA-A*02:03; BRAF; N581S; 0
SIFLHEDLTV

SEQ ID NO: 17699 - protein, 9 aa, Homo sapiens
  Table A; HLA-A*02:04; ROBO2; D1014N; 0
SIHELAVNL

SEQ ID NO: 17700 - protein, 9 aa, Homo sapiens
  Table A; HLA-A*02:05; ROBO2; D1014N; 0
SIHELAVNL

SEQ ID NO: 17701 - protein, 10 aa, Homo sapiens
  Table A; HLA-A*11:01; PIK3R1; L573P; 0
SIKPDLIQPR

SEQ ID NO: 17702 - protein, 10 aa, Homo sapiens
  Table A; HLA-A*26:03; PIK3R1; L573P; 0
SIKPDLIQPR

SEQ ID NO: 17703 - protein, 10 aa, Homo sapiens
  Table A; HLA-A*30:01; PIK3R1; L573P; 0
SIKPDLIQPR

SEQ ID NO: 17704 - protein, 10 aa, Homo sapiens
  Table A; HLA-A*31:01; PIK3R1; L573P; 0
SIKPDLIQPR

SEQ ID NO: 17705 - protein, 10 aa, Homo sapiens
  Table A; HLA-A*33:01; PIK3R1; L573P; 0
SIKPDLIQPR

SEQ ID NO: 17706 - protein, 10 aa, Homo sapiens
  Table A; HLA-A*33:03; PIK3R1; L573P; 0
SIKPDLIQPR

SEQ ID NO: 17707 - protein, 10 aa, Homo sapiens
  Table A; HLA-A*68:01; PIK3R1; L573P; 0
SIKPDLIQPR

SEQ ID NO: 17708 - protein, 11 aa, Homo sapiens
  Table A; HLA-A*11:01; PIK3R1; L573P; 0
SIKPDLIQPRK

SEQ ID NO: 17709 - protein, 9 aa, Homo sapiens
  Table A; HLA-A*31:01; KLK2; E161K; 0
SIKPEEFLR

SEQ ID NO: 17710 - protein, 11 aa, Homo sapiens
  Table A; HLA-A*31:01; KLK2; E161K; 0
SIKPEEFLRPR

SEQ ID NO: 17711 - protein, 9 aa, Homo sapiens
  Table A; HLA-B*48:01; PREX2; E553K; 0
SKFKDEPLL

SEQ ID NO: 17712 - protein, 9 aa, Homo sapiens
  Table A; HLA-C*06:02; PREX2; E553K; 0
SKFKDEPLL

SEQ ID NO: 17713 - protein, 9 aa, Homo sapiens
  Table A; HLA-B*15:03; BCOR; N1425S; 0
SKNAGETLL

SEQ ID NO: 17714 - protein, 9 aa, Homo sapiens
  Table A; HLA-B*39:01; BCOR; N1425S; 0
SKNAGETLL

SEQ ID NO: 17715 - protein, 9 aa, Homo sapiens
  Table A; HLA-B*48:01; BCOR; N1425S; 0
SKNAGETLL

SEQ ID NO: 17716 - protein, 9 aa, Homo sapiens
  Table A; HLA-C*08:03; BCOR; N1425S; 0
SKNAGETLL

SEQ ID NO: 17717 - protein, 11 aa, Homo sapiens
  Table A; HLA-A*31:01; BCOR; N1425S; 1
SKNAGETLLQR

SEQ ID NO: 17718 - protein, 8 aa, Homo sapiens
  Table A; HLA-C*08:03; CHD4; R975H; 0
SKTELIVH

SEQ ID NO: 17719 - protein, 9 aa, Homo sapiens
  Table A; HLA-A*02:01; CHD4; R975H; 1
SKTELIVHV

SEQ ID NO: 17720 - protein, 9 aa, Homo sapiens
  Table A; HLA-A*02:04; CHD4; R975H; 0
SKTELIVHV

SEQ ID NO: 17721 - protein, 9 aa, Homo sapiens
  Table A; HLA-A*02:05; CHD4; R975H; 0
SKTELIVHV

SEQ ID NO: 17722 - protein, 9 aa, Homo sapiens
  Table A; HLA-A*02:06; CHD4; R975H; 0
SKTELIVHV

SEQ ID NO: 17723 - protein, 9 aa, Homo sapiens
  Table A; HLA-A*68:02; CHD4; R975H; 0
SKTELIVHV

SEQ ID NO: 17724 - protein, 9 aa, Homo sapiens
  Table A; HLA-B*13:02; CHD4; R975H; 0
SKTELIVHV

SEQ ID NO: 17725 - protein, 9 aa, Homo sapiens
  Table A; HLA-B*39:06; CHD4; R975H; 0
SKTELIVHV

SEQ ID NO: 17726 - protein, 9 aa, Homo sapiens
  Table A; HLA-C*06:02; CHD4; R975H; 1
SKTELIVHV

SEQ ID NO: 17727 - protein, 9 aa, Homo sapiens
  Table A; HLA-A*02:01; DCAF12L2; R378H; 1
SLLFYDIHA

SEQ ID NO: 17728 - protein, 9 aa, Homo sapiens
  Table A; HLA-A*02:04; DCAF12L2; R378H; 0
SLLFYDIHA

SEQ ID NO: 17729 - protein, 8 aa, Homo sapiens
  Table A; HLA-B*13:02; MB21D2; Q311E; 0
SLMQAYEA

SEQ ID NO: 17730 - protein, 8 aa, Homo sapiens
  Table A; HLA-B*39:06; MB21D2; Q311E; 0
SLMQAYEA

SEQ ID NO: 17731 - protein, 9 aa, Homo sapiens
  Table A; HLA-A*02:01; MB21D2; Q311E; 1
SLMQAYEAC

SEQ ID NO: 17732 - protein, 10 aa, Homo sapiens
  Table A; HLA-A*03:02; MB21D2; Q311E; 0
SLMQAYEACK

SEQ ID NO: 17733 - protein, 10 aa, Homo sapiens
  Table A; HLA-B*27:02; MB21D2; Q311E; 0
SLMQAYEACK

SEQ ID NO: 17734 - protein, 9 aa, Homo sapiens
  Table A; HLA-A*02:04; PTPRD; S431L; 0
SLTTILVQW

SEQ ID NO: 17735 - protein, 9 aa, Homo sapiens
  Table A; HLA-B*15:13; PTPRD; S431L; 0
SLTTILVQW

SEQ ID NO: 17736 - protein, 9 aa, Homo sapiens
  Table A; HLA-B*57:01; PTPRD; S431L; 0
SLTTILVQW

SEQ ID NO: 17737 - protein, 9 aa, Homo sapiens
  Table A; HLA-B*58:01; PTPRD; S431L; 0
SLTTILVQW

SEQ ID NO: 17738 - protein, 9 aa, Homo sapiens
  Table A; HLA-A*02:03; ACSL3; R232Q; 0
SLVPRLQHI

SEQ ID NO: 17739 - protein, 9 aa, Homo sapiens
  Table A; HLA-A*02:04; ACSL3; R232Q; 0
SLVPRLQHI

SEQ ID NO: 17740 - protein, 9 aa, Homo sapiens
  Table A; HLA-A*26:03; A1CF; E34K; 0
SLVQKNGQR

SEQ ID NO: 17741 - protein, 10 aa, Homo sapiens
  Table A; HLA-A*02:01; SMARCA4; G1232S; 1
SMFDQKSSSH

SEQ ID NO: 17742 - protein, 10 aa, Homo sapiens
  Table A; HLA-A*02:03; SMARCA4; G1232S; 0
SMFDQKSSSH

SEQ ID NO: 17743 - protein, 10 aa, Homo sapiens
  Table A; HLA-A*03:01; SMARCA4; G1232S; 1
SMFDQKSSSH

SEQ ID NO: 17744 - protein, 10 aa, Homo sapiens
  Table A; HLA-A*03:02; SMARCA4; G1232S; 0
SMFDQKSSSH

SEQ ID NO: 17745 - protein, 10 aa, Homo sapiens
  Table A; HLA-B*15:01; SMARCA4; G1232S; 0
SMFDQKSSSH

SEQ ID NO: 17746 - protein, 10 aa, Homo sapiens
  Table A; HLA-B*48:01; SMARCA4; G1232S; 0
SMFDQKSSSH

SEQ ID NO: 17747 - protein, 10 aa, Homo sapiens
  Table A; HLA-C*08:03; SMARCA4; G1232S; 0
SMFDQKSSSH

SEQ ID NO: 17748 - protein, 8 aa, Homo sapiens
  Table A; HLA-B*07:02; PIK3CA; G1007R; 1
SMMLRSGM

SEQ ID NO: 17749 - protein, 8 aa, Homo sapiens
  Table A; HLA-B*08:01; PIK3CA; G1007R; 1
SMMLRSGM

SEQ ID NO: 17750 - protein, 10 aa, Homo sapiens
  Table A; HLA-B*07:02; XPO1; R749Q; 1
SMQTVKRETL

SEQ ID NO: 17751 - protein, 11 aa, Homo sapiens
  Table A; HLA-A*03:02; XPO1; R749Q; 0
SMQTVKRETLK

SEQ ID NO: 17752 - protein, 8 aa, Homo sapiens
  Table A; HLA-B*39:06; CREBBP; P2094L; 0
SNLQLMAA

SEQ ID NO: 17753 - protein, 8 aa, Homo sapiens
  Table A; HLA-B*07:02; TP53; L130F; 1
SPAFNKMF

SEQ ID NO: 17754 - protein, 9 aa, Homo sapiens
  Table A; HLA-B*07:02; TP53; C135F; 1
SPALNKMFF

SEQ ID NO: 17755 - protein, 8 aa, Homo sapiens
  Table A; HLA-B*07:02; TP53; F134L; 1
SPALNKML

SEQ ID NO: 17756 - protein, 8 aa, Homo sapiens
  Table A; HLA-B*08:01; TP53; F134L; 1
SPALNKML

SEQ ID NO: 17757 - protein, 9 aa, Homo sapiens
  Table A; HLA-B*07:02; TP53; F134L; 1
SPALNKMLC

SEQ ID NO: 17758 - protein, 9 aa, Homo sapiens
  Table A; HLA-B*56:01; TP53; F134L; 0
SPALNKMLC

SEQ ID NO: 17759 - protein, 11 aa, Homo sapiens
  Table A; HLA-B*07:02; TP53; F134L; 1
SPALNKMLCQL

SEQ ID NO: 17760 - protein, 8 aa, Homo sapiens
  Table A; HLA-B*07:02; TP53; K132N; 1
SPALNNMF

SEQ ID NO: 17761 - protein, 8 aa, Homo sapiens
  Table A; HLA-B*08:01; TP53; K132N; 1
SPALNNMF

SEQ ID NO: 17762 - protein, 8 aa, Homo sapiens
  Table A; HLA-B*35:01; TP53; K132N; 0
SPALNNMF

SEQ ID NO: 17763 - protein, 8 aa, Homo sapiens
  Table A; HLA-B*35:03; TP53; K132N; 0
SPALNNMF

SEQ ID NO: 17764 - protein, 9 aa, Homo sapiens
  Table A; HLA-B*56:01; TP53; K132N; 0
SPALNNMFC

SEQ ID NO: 17765 - protein, 8 aa, Homo sapiens
  Table A; HLA-B*07:02; TP53; K132R; 1
SPALNRMF

SEQ ID NO: 17766 - protein, 11 aa, Homo sapiens
  Table A; HLA-B*07:02; TP53; K132R; 1
SPALNRMFCQL

SEQ ID NO: 17767 - protein, 10 aa, Homo sapiens
  Table A; HLA-B*07:02; PDE4DIP; C1297R; 1
SPEREEHNSL

SEQ ID NO: 17768 - protein, 10 aa, Homo sapiens
  Table A; HLA-B*35:02; PDE4DIP; C1297R; 0
SPEREEHNSL

SEQ ID NO: 17769 - protein, 10 aa, Homo sapiens
  Table A; HLA-B*35:03; PDE4DIP; C1297R; 0
SPEREEHNSL

SEQ ID NO: 17770 - protein, 10 aa, Homo sapiens
  Table A; HLA-B*35:08; PDE4DIP; C1297R; 0
SPEREEHNSL

SEQ ID NO: 17771 - protein, 10 aa, Homo sapiens
  Table A; HLA-B*35:12; PDE4DIP; C1297R; 0
SPEREEHNSL

SEQ ID NO: 17772 - protein, 9 aa, Homo sapiens
  Table A; HLA-B*07:02; TP53; R249S; 1
SPILTIITL

SEQ ID NO: 17773 - protein, 9 aa, Homo sapiens
  Table A; HLA-B*08:01; TP53; R249S; 1
SPILTIITL

SEQ ID NO: 17774 - protein, 9 aa, Homo sapiens
  Table A; HLA-B*15:02; TP53; R249S; 0
SPILTIITL

SEQ ID NO: 17775 - protein, 9 aa, Homo sapiens
  Table A; HLA-B*15:10; TP53; R249S; 0
SPILTIITL

SEQ ID NO: 17776 - protein, 9 aa, Homo sapiens
  Table A; HLA-B*35:01; TP53; R249S; 1
SPILTIITL

SEQ ID NO: 17777 - protein, 9 aa, Homo sapiens
  Table A; HLA-B*35:02; TP53; R249S; 0
SPILTIITL

SEQ ID NO: 17778 - protein, 9 aa, Homo sapiens
  Table A; HLA-B*35:03; TP53; R249S; 1
SPILTIITL

SEQ ID NO: 17779 - protein, 9 aa, Homo sapiens
  Table A; HLA-B*35:08; TP53; R249S; 0
SPILTIITL

SEQ ID NO: 17780 - protein, 9 aa, Homo sapiens
  Table A; HLA-B*35:12; TP53; R249S; 0
SPILTIITL

SEQ ID NO: 17781 - protein, 9 aa, Homo sapiens
  Table A; HLA-B*40:02; TP53; R249S; 0
SPILTIITL

SEQ ID NO: 17782 - protein, 9 aa, Homo sapiens
  Table A; HLA-B*51:01; TP53; R249S; 1
SPILTIITL

SEQ ID NO: 17783 - protein, 9 aa, Homo sapiens
  Table A; HLA-B*54:01; TP53; R249S; 0
SPILTIITL

SEQ ID NO: 17784 - protein, 9 aa, Homo sapiens
  Table A; HLA-B*55:01; TP53; R249S; 1
SPILTIITL

SEQ ID NO: 17785 - protein, 9 aa, Homo sapiens
  Table A; HLA-B*55:02; TP53; R249S; 0
SPILTIITL

SEQ ID NO: 17786 - protein, 9 aa, Homo sapiens
  Table A; HLA-B*56:01; TP53; R249S; 0
SPILTIITL

SEQ ID NO: 17787 - protein, 9 aa, Homo sapiens
  Table A; HLA-C*08:01; TP53; R249S; 0
SPILTIITL

SEQ ID NO: 17788 - protein, 8 aa, Homo sapiens
  Table A; HLA-B*39:06; SFRP4; R232Q; 0
SPIPQTQV

SEQ ID NO: 17789 - protein, 8 aa, Homo sapiens
  Table A; HLA-B*51:01; SFRP4; R232Q; 1
SPIPQTQV

SEQ ID NO: 17790 - protein, 8 aa, Homo sapiens
  Table A; HLA-B*54:01; SFRP4; R232Q; 0
SPIPQTQV

SEQ ID NO: 17791 - protein, 8 aa, Homo sapiens
  Table A; HLA-B*55:01; SFRP4; R232Q; 0
SPIPQTQV

SEQ ID NO: 17792 - protein, 8 aa, Homo sapiens
  Table A; HLA-B*55:02; SFRP4; R232Q; 0
SPIPQTQV

SEQ ID NO: 17793 - protein, 8 aa, Homo sapiens
  Table A; HLA-B*56:01; SFRP4; R232Q; 0
SPIPQTQV

SEQ ID NO: 17794 - protein, 9 aa, Homo sapiens
  Table A; HLA-B*35:03; SFRP4; R232Q; 0
SPIPQTQVP

SEQ ID NO: 17795 - protein, 9 aa, Homo sapiens
  Table A; HLA-B*39:06; SFRP4; R232Q; 0
SPIPQTQVP

SEQ ID NO: 17796 - protein, 9 aa, Homo sapiens
  Table A; HLA-B*54:01; SFRP4; R232Q; 0
SPIPQTQVP

SEQ ID NO: 17797 - protein, 9 aa, Homo sapiens
  Table A; HLA-B*55:01; SFRP4; R232Q; 0
SPIPQTQVP

SEQ ID NO: 17798 - protein, 9 aa, Homo sapiens
  Table A; HLA-B*55:02; SFRP4; R232Q; 0
SPIPQTQVP

SEQ ID NO: 17799 - protein, 9 aa, Homo sapiens
  Table A; HLA-B*56:01; SFRP4; R232Q; 0
SPIPQTQVP

SEQ ID NO: 17800 - protein, 10 aa, Homo sapiens
  Table A; HLA-B*07:02; SFRP4; R232Q; 1
SPIPQTQVPL

SEQ ID NO: 17801 - protein, 10 aa, Homo sapiens
  Table A; HLA-B*35:03; SFRP4; R232Q; 0
SPIPQTQVPL

SEQ ID NO: 17802 - protein, 10 aa, Homo sapiens
  Table A; HLA-B*35:12; SFRP4; R232Q; 0
SPIPQTQVPL

SEQ ID NO: 17803 - protein, 10 aa, Homo sapiens
  Table A; HLA-B*55:01; SFRP4; R232Q; 0
SPIPQTQVPL

SEQ ID NO: 17804 - protein, 10 aa, Homo sapiens
  Table A; HLA-B*55:02; SFRP4; R232Q; 0
SPIPQTQVPL

SEQ ID NO: 17805 - protein, 10 aa, Homo sapiens
  Table A; HLA-B*56:01; SFRP4; R232Q; 0
SPIPQTQVPL

SEQ ID NO: 17806 - protein, 11 aa, Homo sapiens
  Table A; HLA-B*55:02; SFRP4; R232Q; 0
SPIPQTQVPLI

SEQ ID NO: 17807 - protein, 9 aa, Homo sapiens
  Table A; HLA-B*55:02; TP53; P151S; 0
SPPGTRVRA

SEQ ID NO: 17808 - protein, 9 aa, Homo sapiens
  Table A; HLA-B*56:01; TP53; P151S; 0
SPPGTRVRA

SEQ ID NO: 17809 - protein, 10 aa, Homo sapiens
  Table A; HLA-B*07:02; TP53; P151S; 1
SPPGTRVRAM

SEQ ID NO: 17810 - protein, 10 aa, Homo sapiens
  Table A; HLA-C*01:02; TP53; P151S; 0
SPPGTRVRAM

SEQ ID NO: 17811 - protein, 11 aa, Homo sapiens
  Table A; HLA-B*07:02; TP53; P151S; 1
SPPGTRVRAMA

SEQ ID NO: 17812 - protein, 8 aa, Homo sapiens
  Table A; HLA-A*03:02; MAX; R60Q; 0
SQAQILDK

SEQ ID NO: 17813 - protein, 8 aa, Homo sapiens
  Table A; HLA-A*11:01; MAX; R60Q; 1
SQAQILDK

SEQ ID NO: 17814 - protein, 8 aa, Homo sapiens
  Table A; HLA-B*13:02; MAX; R60Q; 0
SQAQILDK

SEQ ID NO: 17815 - protein, 9 aa, Homo sapiens
  Table A; HLA-A*02:03; MAX; R60Q; 0
SQAQILDKA

SEQ ID NO: 17816 - protein, 9 aa, Homo sapiens
  Table A; HLA-A*02:05; MAX; R60Q; 0
SQAQILDKA

SEQ ID NO: 17817 - protein, 9 aa, Homo sapiens
  Table A; HLA-A*02:06; MAX; R60Q; 0
SQAQILDKA

SEQ ID NO: 17818 - protein, 9 aa, Homo sapiens
  Table A; HLA-A*02:08; MAX; R60Q; 0
SQAQILDKA

SEQ ID NO: 17819 - protein, 9 aa, Homo sapiens
  Table A; HLA-A*68:02; MAX; R60Q; 0
SQAQILDKA

SEQ ID NO: 17820 - protein, 9 aa, Homo sapiens
  Table A; HLA-B*13:01; MAX; R60Q; 0
SQAQILDKA

SEQ ID NO: 17821 - protein, 9 aa, Homo sapiens
  Table A; HLA-B*13:02; MAX; R60Q; 0
SQAQILDKA

SEQ ID NO: 17822 - protein, 9 aa, Homo sapiens
  Table A; HLA-B*39:06; MAX; R60Q; 0
SQAQILDKA

SEQ ID NO: 17823 - protein, 9 aa, Homo sapiens
  Table A; HLA-B*48:01; MAX; R60Q; 0
SQAQILDKA

SEQ ID NO: 17824 - protein, 9 aa, Homo sapiens
  Table A; HLA-B*50:01; MAX; R60Q; 0
SQAQILDKA

SEQ ID NO: 17825 - protein, 8 aa, Homo sapiens
  Table A; HLA-B*13:02; FBXW7; R479Q; 0
SQDATLRV

SEQ ID NO: 17826 - protein, 9 aa, Homo sapiens
  Table A; HLA-B*44:03; FBXW7; R479Q; 0
SQDATLRVW

SEQ ID NO: 17827 - protein, 9 aa, Homo sapiens
  Table A; HLA-B*57:01; FBXW7; R479Q; 0
SQDATLRVW

SEQ ID NO: 17828 - protein, 10 aa, Homo sapiens
  Table A; HLA-B*27:02; NFE2L2; R34Q; 0
SQEVFDFSQR

SEQ ID NO: 17829 - protein, 8 aa, Homo sapiens
  Table A; HLA-B*13:02; STAG2; R370Q; 0
SQFKDRIV

SEQ ID NO: 17830 - protein, 8 aa, Homo sapiens
  Table A; HLA-B*39:06; STAG2; R370Q; 0
SQFKDRIV

SEQ ID NO: 17831 - protein, 10 aa, Homo sapiens
  Table A; HLA-A*02:03; STAG2; R370Q; 0
SQFKDRIVSM

SEQ ID NO: 17832 - protein, 10 aa, Homo sapiens
  Table A; HLA-A*02:04; STAG2; R370Q; 0
SQFKDRIVSM

SEQ ID NO: 17833 - protein, 10 aa, Homo sapiens
  Table A; HLA-A*02:05; STAG2; R370Q; 0
SQFKDRIVSM

SEQ ID NO: 17834 - protein, 10 aa, Homo sapiens
  Table A; HLA-A*02:06; STAG2; R370Q; 0
SQFKDRIVSM

SEQ ID NO: 17835 - protein, 10 aa, Homo sapiens
  Table A; HLA-A*02:08; STAG2; R370Q; 0
SQFKDRIVSM

SEQ ID NO: 17836 - protein, 10 aa, Homo sapiens
  Table A; HLA-A*11:01; STAG2; R370Q; 0
SQFKDRIVSM

SEQ ID NO: 17837 - protein, 10 aa, Homo sapiens
  Table A; HLA-A*30:01; STAG2; R370Q; 0
SQFKDRIVSM

SEQ ID NO: 17838 - protein, 10 aa, Homo sapiens
  Table A; HLA-B*13:01; STAG2; R370Q; 0
SQFKDRIVSM

SEQ ID NO: 17839 - protein, 10 aa, Homo sapiens
  Table A; HLA-B*13:02; STAG2; R370Q; 0
SQFKDRIVSM

SEQ ID NO: 17840 - protein, 10 aa, Homo sapiens
  Table A; HLA-B*14:02; STAG2; R370Q; 0
SQFKDRIVSM

SEQ ID NO: 17841 - protein, 10 aa, Homo sapiens
  Table A; HLA-B*15:01; STAG2; R370Q; 0
SQFKDRIVSM

SEQ ID NO: 17842 - protein, 10 aa, Homo sapiens
  Table A; HLA-B*15:02; STAG2; R370Q; 0
SQFKDRIVSM

SEQ ID NO: 17843 - protein, 10 aa, Homo sapiens
  Table A; HLA-B*15:03; STAG2; R370Q; 0
SQFKDRIVSM

SEQ ID NO: 17844 - protein, 10 aa, Homo sapiens
  Table A; HLA-B*40:02; STAG2; R370Q; 0
SQFKDRIVSM

SEQ ID NO: 17845 - protein, 10 aa, Homo sapiens
  Table A; HLA-B*48:01; STAG2; R370Q; 0
SQFKDRIVSM

SEQ ID NO: 17846 - protein, 10 aa, Homo sapiens
  Table A; HLA-B*50:01; STAG2; R370Q; 0
SQFKDRIVSM

SEQ ID NO: 17847 - protein, 10 aa, Homo sapiens
  Table A; HLA-C*02:02; STAG2; R370Q; 0
SQFKDRIVSM

SEQ ID NO: 17848 - protein, 8 aa, Homo sapiens
  Table A; HLA-A*02:05; TP53; V173L; 0
SQHMTEVL

SEQ ID NO: 17849 - protein, 8 aa, Homo sapiens
  Table A; HLA-B*13:01; TP53; V173L; 0
SQHMTEVL

SEQ ID NO: 17850 - protein, 8 aa, Homo sapiens
  Table A; HLA-B*13:02; TP53; V173L; 0
SQHMTEVL

SEQ ID NO: 17851 - protein, 8 aa, Homo sapiens
  Table A; HLA-B*14:02; TP53; V173L; 0
SQHMTEVL

SEQ ID NO: 17852 - protein, 8 aa, Homo sapiens
  Table A; HLA-B*15:01; TP53; V173L; 0
SQHMTEVL

SEQ ID NO: 17853 - protein, 8 aa, Homo sapiens
  Table A; HLA-B*15:02; TP53; V173L; 0
SQHMTEVL

SEQ ID NO: 17854 - protein, 8 aa, Homo sapiens
  Table A; HLA-B*15:03; TP53; V173L; 0
SQHMTEVL

SEQ ID NO: 17855 - protein, 8 aa, Homo sapiens
  Table A; HLA-B*15:10; TP53; V173L; 0
SQHMTEVL

SEQ ID NO: 17856 - protein, 8 aa, Homo sapiens
  Table A; HLA-B*38:01; TP53; V173L; 0
SQHMTEVL

SEQ ID NO: 17857 - protein, 8 aa, Homo sapiens
  Table A; HLA-B*39:01; TP53; V173L; 0
SQHMTEVL

SEQ ID NO: 17858 - protein, 8 aa, Homo sapiens
  Table A; HLA-B*39:06; TP53; V173L; 0
SQHMTEVL

SEQ ID NO: 17859 - protein, 8 aa, Homo sapiens
  Table A; HLA-B*40:02; TP53; V173L; 0
SQHMTEVL

SEQ ID NO: 17860 - protein, 8 aa, Homo sapiens
  Table A; HLA-B*41:02; TP53; V173L; 0
SQHMTEVL

SEQ ID NO: 17861 - protein, 8 aa, Homo sapiens
  Table A; HLA-B*48:01; TP53; V173L; 0
SQHMTEVL

SEQ ID NO: 17862 - protein, 8 aa, Homo sapiens
  Table A; HLA-C*08:03; TP53; V173L; 0
SQHMTEVL

SEQ ID NO: 17863 - protein, 9 aa, Homo sapiens
  Table A; HLA-A*31:01; TP53; V173L; 0
SQHMTEVLR

SEQ ID NO: 17864 - protein, 9 aa, Homo sapiens
  Table A; HLA-A*68:01; TP53; V173L; 0
SQHMTEVLR

SEQ ID NO: 17865 - protein, 9 aa, Homo sapiens
  Table A; HLA-B*27:02; TP53; V173L; 0
SQHMTEVLR

SEQ ID NO: 17866 - protein, 8 aa, Homo sapiens
  Table A; HLA-B*08:01; TP53; V173M; 1
SQHMTEVM

SEQ ID NO: 17867 - protein, 8 aa, Homo sapiens
  Table A; HLA-B*13:01; TP53; V173M; 0
SQHMTEVM

SEQ ID NO: 17868 - protein, 8 aa, Homo sapiens
  Table A; HLA-B*13:02; TP53; V173M; 0
SQHMTEVM

SEQ ID NO: 17869 - protein, 8 aa, Homo sapiens
  Table A; HLA-B*14:02; TP53; V173M; 0
SQHMTEVM

SEQ ID NO: 17870 - protein, 8 aa, Homo sapiens
  Table A; HLA-B*15:01; TP53; V173M; 0
SQHMTEVM

SEQ ID NO: 17871 - protein, 8 aa, Homo sapiens
  Table A; HLA-B*15:02; TP53; V173M; 0
SQHMTEVM

SEQ ID NO: 17872 - protein, 8 aa, Homo sapiens
  Table A; HLA-B*15:03; TP53; V173M; 0
SQHMTEVM

SEQ ID NO: 17873 - protein, 8 aa, Homo sapiens
  Table A; HLA-B*15:10; TP53; V173M; 0
SQHMTEVM

SEQ ID NO: 17874 - protein, 8 aa, Homo sapiens
  Table A; HLA-B*35:01; TP53; V173M; 0
SQHMTEVM

SEQ ID NO: 17875 - protein, 8 aa, Homo sapiens
  Table A; HLA-B*35:08; TP53; V173M; 0
SQHMTEVM

SEQ ID NO: 17876 - protein, 8 aa, Homo sapiens
  Table A; HLA-B*38:01; TP53; V173M; 0
SQHMTEVM

SEQ ID NO: 17877 - protein, 8 aa, Homo sapiens
  Table A; HLA-B*39:01; TP53; V173M; 0
SQHMTEVM

SEQ ID NO: 17878 - protein, 8 aa, Homo sapiens
  Table A; HLA-B*39:06; TP53; V173M; 0
SQHMTEVM

SEQ ID NO: 17879 - protein, 8 aa, Homo sapiens
  Table A; HLA-B*40:02; TP53; V173M; 0
SQHMTEVM

SEQ ID NO: 17880 - protein, 8 aa, Homo sapiens
  Table A; HLA-B*46:01; TP53; V173M; 0
SQHMTEVM

SEQ ID NO: 17881 - protein, 8 aa, Homo sapiens
  Table A; HLA-B*48:01; TP53; V173M; 0
SQHMTEVM

SEQ ID NO: 17882 - protein, 8 aa, Homo sapiens
  Table A; HLA-C*08:01; TP53; V173M; 0
SQHMTEVM

SEQ ID NO: 17883 - protein, 8 aa, Homo sapiens
  Table A; HLA-C*08:03; TP53; V173M; 0
SQHMTEVM

SEQ ID NO: 17884 - protein, 9 aa, Homo sapiens
  Table A; HLA-A*31:01; TP53; V173M; 0
SQHMTEVMR

SEQ ID NO: 17885 - protein, 9 aa, Homo sapiens
  Table A; HLA-B*15:01; TP53; V173M; 0
SQHMTEVMR

SEQ ID NO: 17886 - protein, 9 aa, Homo sapiens
  Table A; HLA-B*27:02; TP53; V173M; 0
SQHMTEVMR

SEQ ID NO: 17887 - protein, 8 aa, Homo sapiens
  Table A; HLA-A*03:01; SF3B1; R957Q; 1
SQTAVVMK

SEQ ID NO: 17888 - protein, 8 aa, Homo sapiens
  Table A; HLA-A*03:02; SF3B1; R957Q; 0
SQTAVVMK

SEQ ID NO: 17889 - protein, 8 aa, Homo sapiens
  Table A; HLA-A*11:01; SF3B1; R957Q; 1
SQTAVVMK

SEQ ID NO: 17890 - protein, 8 aa, Homo sapiens
  Table A; HLA-B*13:02; SF3B1; R957Q; 0
SQTAVVMK

SEQ ID NO: 17891 - protein, 8 aa, Homo sapiens
  Table A; HLA-B*27:05; SF3B1; R957Q; 1
SQTAVVMK

SEQ ID NO: 17892 - protein, 8 aa, Homo sapiens
  Table A; HLA-B*39:06; SF3B1; R957Q; 0
SQTAVVMK

SEQ ID NO: 17893 - protein, 8 aa, Homo sapiens
  Table A; HLA-B*48:01; SF3B1; R957Q; 0
SQTAVVMK

SEQ ID NO: 17894 - protein, 9 aa, Homo sapiens
  Table A; HLA-A*02:01; SF3B1; R957Q; 1
SQTAVVMKT

SEQ ID NO: 17895 - protein, 9 aa, Homo sapiens
  Table A; HLA-A*02:03; SF3B1; R957Q; 0
SQTAVVMKT

SEQ ID NO: 17896 - protein, 9 aa, Homo sapiens
  Table A; HLA-A*02:04; SF3B1; R957Q; 0
SQTAVVMKT

SEQ ID NO: 17897 - protein, 9 aa, Homo sapiens
  Table A; HLA-A*02:05; SF3B1; R957Q; 0
SQTAVVMKT

SEQ ID NO: 17898 - protein, 9 aa, Homo sapiens
  Table A; HLA-A*02:06; SF3B1; R957Q; 0
SQTAVVMKT

SEQ ID NO: 17899 - protein, 9 aa, Homo sapiens
  Table A; HLA-A*02:08; SF3B1; R957Q; 0
SQTAVVMKT

SEQ ID NO: 17900 - protein, 9 aa, Homo sapiens
  Table A; HLA-A*11:01; SF3B1; R957Q; 1
SQTAVVMKT

SEQ ID NO: 17901 - protein, 9 aa, Homo sapiens
  Table A; HLA-A*30:01; SF3B1; R957Q; 0
SQTAVVMKT

SEQ ID NO: 17902 - protein, 9 aa, Homo sapiens
  Table A; HLA-A*31:01; SF3B1; R957Q; 0
SQTAVVMKT

SEQ ID NO: 17903 - protein, 9 aa, Homo sapiens
  Table A; HLA-A*68:02; SF3B1; R957Q; 0
SQTAVVMKT

SEQ ID NO: 17904 - protein, 9 aa, Homo sapiens
  Table A; HLA-B*13:01; SF3B1; R957Q; 0
SQTAVVMKT

SEQ ID NO: 17905 - protein, 9 aa, Homo sapiens
  Table A; HLA-B*13:02; SF3B1; R957Q; 0
SQTAVVMKT

SEQ ID NO: 17906 - protein, 9 aa, Homo sapiens
  Table A; HLA-B*15:01; SF3B1; R957Q; 1
SQTAVVMKT

SEQ ID NO: 17907 - protein, 9 aa, Homo sapiens
  Table A; HLA-B*15:10; SF3B1; R957Q; 0
SQTAVVMKT

SEQ ID NO: 17908 - protein, 9 aa, Homo sapiens
  Table A; HLA-B*27:05; SF3B1; R957Q; 1
SQTAVVMKT

SEQ ID NO: 17909 - protein, 9 aa, Homo sapiens
  Table A; HLA-B*38:01; SF3B1; R957Q; 0
SQTAVVMKT

SEQ ID NO: 17910 - protein, 9 aa, Homo sapiens
  Table A; HLA-B*39:01; SF3B1; R957Q; 0
SQTAVVMKT

SEQ ID NO: 17911 - protein, 9 aa, Homo sapiens
  Table A; HLA-B*39:06; SF3B1; R957Q; 0
SQTAVVMKT

SEQ ID NO: 17912 - protein, 9 aa, Homo sapiens
  Table A; HLA-B*48:01; SF3B1; R957Q; 0
SQTAVVMKT

SEQ ID NO: 17913 - protein, 9 aa, Homo sapiens
  Table A; HLA-B*50:01; SF3B1; R957Q; 0
SQTAVVMKT

SEQ ID NO: 17914 - protein, 9 aa, Homo sapiens
  Table A; HLA-C*08:01; SF3B1; R957Q; 0
SQTAVVMKT

SEQ ID NO: 17915 - protein, 9 aa, Homo sapiens
  Table A; HLA-C*08:03; SF3B1; R957Q; 0
SQTAVVMKT

SEQ ID NO: 17916 - protein, 9 aa, Homo sapiens
  Table A; HLA-C*16:02; SF3B1; R957Q; 0
SQTAVVMKT

SEQ ID NO: 17917 - protein, 10 aa, Homo sapiens
  Table A; HLA-B*27:05; CHD4; R1162W; 0
SRAHWIGQNK

SEQ ID NO: 17918 - protein, 9 aa, Homo sapiens
  Table A; HLA-B*27:05; CTNNB1; G34R; 1
SRIHSGATT

SEQ ID NO: 17919 - protein, 9 aa, Homo sapiens
  Table A; HLA-B*39:06; CTNNB1; G34R; 0
SRIHSGATT

SEQ ID NO: 17920 - protein, 10 aa, Homo sapiens
  Table A; HLA-B*27:02; CTNNB1; G34R; 0
SRIHSGATTT

SEQ ID NO: 17921 - protein, 10 aa, Homo sapiens
  Table A; HLA-B*27:05; CTNNB1; G34R; 1
SRIHSGATTT

SEQ ID NO: 17922 - protein, 11 aa, Homo sapiens
  Table A; HLA-A*02:05; CTNNB1; G34R; 0
SRIHSGATTTA

SEQ ID NO: 17923 - protein, 11 aa, Homo sapiens
  Table A; HLA-B*27:02; CTNNB1; G34R; 0
SRIHSGATTTA

SEQ ID NO: 17924 - protein, 11 aa, Homo sapiens
  Table A; HLA-B*27:05; CTNNB1; G34R; 1
SRIHSGATTTA

SEQ ID NO: 17925 - protein, 11 aa, Homo sapiens
  Table A; HLA-B*39:01; CTNNB1; G34R; 0
SRIHSGATTTA

SEQ ID NO: 17926 - protein, 11 aa, Homo sapiens
  Table A; HLA-B*39:06; CTNNB1; G34R; 0
SRIHSGATTTA

SEQ ID NO: 17927 - protein, 11 aa, Homo sapiens
  Table A; HLA-B*55:02; CTNNB1; G34R; 0
SRIHSGATTTA

SEQ ID NO: 17928 - protein, 8 aa, Homo sapiens
  Table A; HLA-B*27:02; PCBP1; L100Q; 0
SRPPVTQR

SEQ ID NO: 17929 - protein, 8 aa, Homo sapiens
  Table A; HLA-B*27:05; PCBP1; L100Q; 0
SRPPVTQR

SEQ ID NO: 17930 - protein, 8 aa, Homo sapiens
  Table A; HLA-B*39:06; PCBP1; L100Q; 0
SRPPVTQR

SEQ ID NO: 17931 - protein, 9 aa, Homo sapiens
  Table A; HLA-A*02:05; PCBP1; L100Q; 0
SRPPVTQRL

SEQ ID NO: 17932 - protein, 9 aa, Homo sapiens
  Table A; HLA-A*02:07; PCBP1; L100Q; 0
SRPPVTQRL

SEQ ID NO: 17933 - protein, 9 aa, Homo sapiens
  Table A; HLA-A*11:01; PCBP1; L100Q; 1
SRPPVTQRL

SEQ ID NO: 17934 - protein, 9 aa, Homo sapiens
  Table A; HLA-A*23:01; PCBP1; L100Q; 0
SRPPVTQRL

SEQ ID NO: 17935 - protein, 9 aa, Homo sapiens
  Table A; HLA-A*24:02; PCBP1; L100Q; 1
SRPPVTQRL

SEQ ID NO: 17936 - protein, 9 aa, Homo sapiens
  Table A; HLA-A*68:01; PCBP1; L100Q; 0
SRPPVTQRL

SEQ ID NO: 17937 - protein, 9 aa, Homo sapiens
  Table A; HLA-A*68:02; PCBP1; L100Q; 0
SRPPVTQRL

SEQ ID NO: 17938 - protein, 9 aa, Homo sapiens
  Table A; HLA-B*07:02; PCBP1; L100Q; 1
SRPPVTQRL

SEQ ID NO: 17939 - protein, 9 aa, Homo sapiens
  Table A; HLA-B*13:02; PCBP1; L100Q; 0
SRPPVTQRL

SEQ ID NO: 17940 - protein, 9 aa, Homo sapiens
  Table A; HLA-B*14:01; PCBP1; L100Q; 0
SRPPVTQRL

SEQ ID NO: 17941 - protein, 9 aa, Homo sapiens
  Table A; HLA-B*14:02; PCBP1; L100Q; 0
SRPPVTQRL

SEQ ID NO: 17942 - protein, 9 aa, Homo sapiens
  Table A; HLA-B*15:10; PCBP1; L100Q; 0
SRPPVTQRL

SEQ ID NO: 17943 - protein, 9 aa, Homo sapiens
  Table A; HLA-B*27:05; PCBP1; L100Q; 0
SRPPVTQRL

SEQ ID NO: 17944 - protein, 9 aa, Homo sapiens
  Table A; HLA-B*38:01; PCBP1; L100Q; 0
SRPPVTQRL

SEQ ID NO: 17945 - protein, 9 aa, Homo sapiens
  Table A; HLA-B*39:01; PCBP1; L100Q; 0
SRPPVTQRL

SEQ ID NO: 17946 - protein, 9 aa, Homo sapiens
  Table A; HLA-B*39:06; PCBP1; L100Q; 0
SRPPVTQRL

SEQ ID NO: 17947 - protein, 9 aa, Homo sapiens
  Table A; HLA-B*40:01; PCBP1; L100Q; 1
SRPPVTQRL

SEQ ID NO: 17948 - protein, 9 aa, Homo sapiens
  Table A; HLA-B*40:02; PCBP1; L100Q; 0
SRPPVTQRL

SEQ ID NO: 17949 - protein, 9 aa, Homo sapiens
  Table A; HLA-B*44:03; PCBP1; L100Q; 1
SRPPVTQRL

SEQ ID NO: 17950 - protein, 9 aa, Homo sapiens
  Table A; HLA-B*44:05; PCBP1; L100Q; 0
SRPPVTQRL

SEQ ID NO: 17951 - protein, 9 aa, Homo sapiens
  Table A; HLA-B*48:01; PCBP1; L100Q; 0
SRPPVTQRL

SEQ ID NO: 17952 - protein, 9 aa, Homo sapiens
  Table A; HLA-C*06:02; PCBP1; L100Q; 1
SRPPVTQRL

SEQ ID NO: 17953 - protein, 9 aa, Homo sapiens
  Table A; HLA-C*07:01; PCBP1; L100Q; 1
SRPPVTQRL

SEQ ID NO: 17954 - protein, 9 aa, Homo sapiens
  Table A; HLA-C*07:02; PCBP1; L100Q; 1
SRPPVTQRL

SEQ ID NO: 17955 - protein, 9 aa, Homo sapiens
  Table A; HLA-C*08:03; PCBP1; L100Q; 0
SRPPVTQRL

SEQ ID NO: 17956 - protein, 9 aa, Homo sapiens
  Table A; HLA-C*16:04; PCBP1; L100Q; 0
SRPPVTQRL

SEQ ID NO: 17957 - protein, 10 aa, Homo sapiens
  Table A; HLA-C*06:02; PCBP1; L100Q; 1
SRPPVTQRLV

SEQ ID NO: 17958 - protein, 10 aa, Homo sapiens
  Table A; HLA-A*68:01; TP53; R248Q; 1
SSCMGGMNQR

SEQ ID NO: 17959 - protein, 9 aa, Homo sapiens
  Table A; HLA-A*68:01; TP53; G245S; 0
SSCMGSMNR

SEQ ID NO: 17960 - protein, 9 aa, Homo sapiens
  Table A; HLA-A*11:01; TP53; G245V; 1
SSCMGVMNR

SEQ ID NO: 17961 - protein, 9 aa, Homo sapiens
  Table A; HLA-A*31:01; TP53; G245V; 0
SSCMGVMNR

SEQ ID NO: 17962 - protein, 9 aa, Homo sapiens
  Table A; HLA-A*33:03; TP53; G245V; 0
SSCMGVMNR

SEQ ID NO: 17963 - protein, 9 aa, Homo sapiens
  Table A; HLA-A*68:01; TP53; G245V; 0
SSCMGVMNR

SEQ ID NO: 17964 - protein, 9 aa, Homo sapiens
  Table A; HLA-A*33:03; TP53; G244S; 0
SSCMSGMNR

SEQ ID NO: 17965 - protein, 10 aa, Homo sapiens
  Table A; HLA-A*68:02; SMAD4; G352V; 0
SSCPIVTVDV

SEQ ID NO: 17966 - protein, 9 aa, Homo sapiens
  Table A; HLA-A*03:01; TP53; C242F; 1
SSFMGGMNR

SEQ ID NO: 17967 - protein, 9 aa, Homo sapiens
  Table A; HLA-A*03:02; TP53; C242F; 0
SSFMGGMNR

SEQ ID NO: 17968 - protein, 9 aa, Homo sapiens
  Table A; HLA-A*11:01; TP53; C242F; 1
SSFMGGMNR

SEQ ID NO: 17969 - protein, 9 aa, Homo sapiens
  Table A; HLA-A*26:03; TP53; C242F; 0
SSFMGGMNR

SEQ ID NO: 17970 - protein, 9 aa, Homo sapiens
  Table A; HLA-A*30:01; TP53; C242F; 0
SSFMGGMNR

SEQ ID NO: 17971 - protein, 9 aa, Homo sapiens
  Table A; HLA-A*31:01; TP53; C242F; 0
SSFMGGMNR

SEQ ID NO: 17972 - protein, 9 aa, Homo sapiens
  Table A; HLA-A*33:01; TP53; C242F; 0
SSFMGGMNR

SEQ ID NO: 17973 - protein, 9 aa, Homo sapiens
  Table A; HLA-A*33:03; TP53; C242F; 0
SSFMGGMNR

SEQ ID NO: 17974 - protein, 9 aa, Homo sapiens
  Table A; HLA-A*68:01; TP53; C242F; 0
SSFMGGMNR

SEQ ID NO: 17975 - protein, 9 aa, Homo sapiens
  Table A; HLA-B*27:02; TP53; C242F; 0
SSFMGGMNR

SEQ ID NO: 17976 - protein, 9 aa, Homo sapiens
  Table A; HLA-B*27:05; TP53; C242F; 0
SSFMGGMNR

SEQ ID NO: 17977 - protein, 10 aa, Homo sapiens
  Table A; HLA-A*11:01; TP53; C242F; 1
SSFMGGMNRR

SEQ ID NO: 17978 - protein, 10 aa, Homo sapiens
  Table A; HLA-A*31:01; TP53; C242F; 0
SSFMGGMNRR

SEQ ID NO: 17979 - protein, 10 aa, Homo sapiens
  Table A; HLA-A*68:01; TP53; C242F; 0
SSFMGGMNRR

SEQ ID NO: 17980 - protein, 8 aa, Homo sapiens
  Table A; HLA-A*11:01; TP53; G266E; 0
SSGNLLER

SEQ ID NO: 17981 - protein, 8 aa, Homo sapiens
  Table A; HLA-A*33:03; TP53; G266E; 0
SSGNLLER

SEQ ID NO: 17982 - protein, 8 aa, Homo sapiens
  Table A; HLA-A*68:01; TP53; G266E; 0
SSGNLLER

SEQ ID NO: 17983 - protein, 8 aa, Homo sapiens
  Table A; HLA-A*11:01; TP53; G266V; 0
SSGNLLVR

SEQ ID NO: 17984 - protein, 8 aa, Homo sapiens
  Table A; HLA-A*33:03; TP53; G266V; 0
SSGNLLVR

SEQ ID NO: 17985 - protein, 8 aa, Homo sapiens
  Table A; HLA-A*68:01; TP53; G266V; 0
SSGNLLVR

SEQ ID NO: 17986 - protein, 11 aa, Homo sapiens
  Table A; HLA-A*03:02; LIFR; E319K; 0
SSGTNVVFTTK

SEQ ID NO: 17987 - protein, 11 aa, Homo sapiens
  Table A; HLA-A*11:01; LIFR; E319K; 0
SSGTNVVFTTK

SEQ ID NO: 17988 - protein, 9 aa, Homo sapiens
  Table A; HLA-B*39:06; MB21D2; Q311E; 0
SSLMQAYEA

SEQ ID NO: 17989 - protein, 9 aa, Homo sapiens
  Table A; HLA-B*54:01; MB21D2; Q311E; 0
SSLMQAYEA

SEQ ID NO: 17990 - protein, 9 aa, Homo sapiens
  Table A; HLA-B*55:02; MB21D2; Q311E; 0
SSLMQAYEA

SEQ ID NO: 17991 - protein, 9 aa, Homo sapiens
  Table A; HLA-B*57:01; DCC; R446H; 0
SSRFVHLSW

SEQ ID NO: 17992 - protein, 10 aa, Homo sapiens
  Table A; HLA-A*68:01; TP53; N239S; 0
SSSCMGGMNR

SEQ ID NO: 17993 - protein, 10 aa, Homo sapiens
  Table A; HLA-A*68:02; SFRP4; R232Q; 0
SSSPIPQTQV

SEQ ID NO: 17994 - protein, 8 aa, Homo sapiens
  Table A; HLA-B*15:01; MAP2K1; P124S; 1
SSYIVGFY

SEQ ID NO: 17995 - protein, 8 aa, Homo sapiens
  Table A; HLA-B*15:02; MAP2K1; P124S; 0
SSYIVGFY

SEQ ID NO: 17996 - protein, 9 aa, Homo sapiens
  Table A; HLA-A*02:06; ERBB2; S310F; 0
STDVGFCTL

SEQ ID NO: 17997 - protein, 9 aa, Homo sapiens
  Table A; HLA-A*02:07; ERBB2; S310F; 0
STDVGFCTL

SEQ ID NO: 17998 - protein, 9 aa, Homo sapiens
  Table A; HLA-B*15:02; ERBB2; S310F; 0
STDVGFCTL

SEQ ID NO: 17999 - protein, 9 aa, Homo sapiens
  Table A; HLA-B*58:01; ERBB2; S310F; 0
STDVGFCTL

SEQ ID NO: 18000 - protein, 9 aa, Homo sapiens
  Table A; HLA-C*03:03; ERBB2; S310F; 1
STDVGFCTL

SEQ ID NO: 18001 - protein, 9 aa, Homo sapiens
  Table A; HLA-C*03:04; ERBB2; S310F; 1
STDVGFCTL

SEQ ID NO: 18002 - protein, 9 aa, Homo sapiens
  Table A; HLA-C*05:01; ERBB2; S310F; 1
STDVGFCTL

SEQ ID NO: 18003 - protein, 9 aa, Homo sapiens
  Table A; HLA-C*08:01; ERBB2; S310F; 0
STDVGFCTL

SEQ ID NO: 18004 - protein, 9 aa, Homo sapiens
  Table A; HLA-C*08:02; ERBB2; S310F; 1
STDVGFCTL

SEQ ID NO: 18005 - protein, 9 aa, Homo sapiens
  Table A; HLA-A*02:07; ERBB2; S310Y; 0
STDVGYCTL

SEQ ID NO: 18006 - protein, 9 aa, Homo sapiens
  Table A; HLA-B*15:02; ERBB2; S310Y; 0
STDVGYCTL

SEQ ID NO: 18007 - protein, 9 aa, Homo sapiens
  Table A; HLA-B*35:02; ERBB2; S310Y; 0
STDVGYCTL

SEQ ID NO: 18008 - protein, 9 aa, Homo sapiens
  Table A; HLA-B*35:12; ERBB2; S310Y; 0
STDVGYCTL

SEQ ID NO: 18009 - protein, 9 aa, Homo sapiens
  Table A; HLA-B*58:01; ERBB2; S310Y; 0
STDVGYCTL

SEQ ID NO: 18010 - protein, 9 aa, Homo sapiens
  Table A; HLA-C*03:04; ERBB2; S310Y; 1
STDVGYCTL

SEQ ID NO: 18011 - protein, 9 aa, Homo sapiens
  Table A; HLA-C*05:01; ERBB2; S310Y; 1
STDVGYCTL

SEQ ID NO: 18012 - protein, 9 aa, Homo sapiens
  Table A; HLA-C*08:01; ERBB2; S310Y; 0
STDVGYCTL

SEQ ID NO: 18013 - protein, 9 aa, Homo sapiens
  Table A; HLA-C*08:02; ERBB2; S310Y; 0
STDVGYCTL

SEQ ID NO: 18014 - protein, 9 aa, Homo sapiens
  Table A; HLA-B*57:01; MYCN; P44L; 1
STLPGEDIW

SEQ ID NO: 18015 - protein, 11 aa, Homo sapiens
  Table A; HLA-A*11:01; MYCN; P44L; 1
STLPGEDIWKK

SEQ ID NO: 18016 - protein, 10 aa, Homo sapiens
  Table A; HLA-A*03:01; CHST11; A159T; 1
STNLKTLNQY

SEQ ID NO: 18017 - protein, 10 aa, Homo sapiens
  Table A; HLA-A*11:01; CHST11; A159T; 1
STNLKTLNQY

SEQ ID NO: 18018 - protein, 10 aa, Homo sapiens
  Table A; HLA-A*26:01; CHST11; A159T; 0
STNLKTLNQY

SEQ ID NO: 18019 - protein, 10 aa, Homo sapiens
  Table A; HLA-A*29:02; CHST11; A159T; 0
STNLKTLNQY

SEQ ID NO: 18020 - protein, 10 aa, Homo sapiens
  Table A; HLA-A*30:02; CHST11; A159T; 0
STNLKTLNQY

SEQ ID NO: 18021 - protein, 10 aa, Homo sapiens
  Table A; HLA-A*30:04; CHST11; A159T; 0
STNLKTLNQY

SEQ ID NO: 18022 - protein, 10 aa, Homo sapiens
  Table A; HLA-B*15:01; CHST11; A159T; 1
STNLKTLNQY

SEQ ID NO: 18023 - protein, 10 aa, Homo sapiens
  Table A; HLA-B*58:01; CHST11; A159T; 0
STNLKTLNQY

SEQ ID NO: 18024 - protein, 9 aa, Homo sapiens
  Table A; HLA-A*11:01; TP53; V157F; 1
STPPPGTRF

SEQ ID NO: 18025 - protein, 9 aa, Homo sapiens
  Table A; HLA-A*25:01; TP53; V157F; 0
STPPPGTRF

SEQ ID NO: 18026 - protein, 9 aa, Homo sapiens
  Table A; HLA-A*26:01; TP53; V157F; 0
STPPPGTRF

SEQ ID NO: 18027 - protein, 9 aa, Homo sapiens
  Table A; HLA-A*26:02; TP53; V157F; 0
STPPPGTRF

SEQ ID NO: 18028 - protein, 9 aa, Homo sapiens
  Table A; HLA-A*26:03; TP53; V157F; 0
STPPPGTRF

SEQ ID NO: 18029 - protein, 9 aa, Homo sapiens
  Table A; HLA-B*07:02; TP53; V157F; 1
STPPPGTRF

SEQ ID NO: 18030 - protein, 9 aa, Homo sapiens
  Table A; HLA-B*15:01; TP53; V157F; 1
STPPPGTRF

SEQ ID NO: 18031 - protein, 9 aa, Homo sapiens
  Table A; HLA-B*15:02; TP53; V157F; 0
STPPPGTRF

SEQ ID NO: 18032 - protein, 9 aa, Homo sapiens
  Table A; HLA-B*15:13; TP53; V157F; 0
STPPPGTRF

SEQ ID NO: 18033 - protein, 9 aa, Homo sapiens
  Table A; HLA-B*35:01; TP53; V157F; 1
STPPPGTRF

SEQ ID NO: 18034 - protein, 9 aa, Homo sapiens
  Table A; HLA-B*35:08; TP53; V157F; 0
STPPPGTRF

SEQ ID NO: 18035 - protein, 9 aa, Homo sapiens
  Table A; HLA-B*39:01; TP53; V157F; 0
STPPPGTRF

SEQ ID NO: 18036 - protein, 9 aa, Homo sapiens
  Table A; HLA-B*44:03; TP53; V157F; 1
STPPPGTRF

SEQ ID NO: 18037 - protein, 9 aa, Homo sapiens
  Table A; HLA-B*44:05; TP53; V157F; 0
STPPPGTRF

SEQ ID NO: 18038 - protein, 9 aa, Homo sapiens
  Table A; HLA-B*57:01; TP53; V157F; 0
STPPPGTRF

SEQ ID NO: 18039 - protein, 9 aa, Homo sapiens
  Table A; HLA-B*58:01; TP53; V157F; 0
STPPPGTRF

SEQ ID NO: 18040 - protein, 9 aa, Homo sapiens
  Table A; HLA-C*01:02; TP53; V157F; 0
STPPPGTRF

SEQ ID NO: 18041 - protein, 9 aa, Homo sapiens
  Table A; HLA-C*02:02; TP53; V157F; 0
STPPPGTRF

SEQ ID NO: 18042 - protein, 9 aa, Homo sapiens
  Table A; HLA-C*03:04; TP53; V157F; 1
STPPPGTRF

SEQ ID NO: 18043 - protein, 10 aa, Homo sapiens
  Table A; HLA-A*11:01; TP53; V157F; 1
STPPPGTRFR

SEQ ID NO: 18044 - protein, 10 aa, Homo sapiens
  Table A; HLA-A*31:01; TP53; V157F; 0
STPPPGTRFR

SEQ ID NO: 18045 - protein, 10 aa, Homo sapiens
  Table A; HLA-A*33:03; TP53; V157F; 0
STPPPGTRFR

SEQ ID NO: 18046 - protein, 10 aa, Homo sapiens
  Table A; HLA-A*68:01; TP53; V157F; 0
STPPPGTRFR

SEQ ID NO: 18047 - protein, 11 aa, Homo sapiens
  Table A; HLA-A*68:02; TP53; R158H; 0
STPPPGTRVHA

SEQ ID NO: 18048 - protein, 11 aa, Homo sapiens
  Table A; HLA-A*68:02; TP53; A159V; 0
STPPPGTRVRV

SEQ ID NO: 18049 - protein, 9 aa, Homo sapiens
  Table A; HLA-A*02:03; SMARCA4; G1162S; 0
STRAGGLSL

SEQ ID NO: 18050 - protein, 9 aa, Homo sapiens
  Table A; HLA-A*03:01; SMARCA4; G1162S; 1
STRAGGLSL

SEQ ID NO: 18051 - protein, 9 aa, Homo sapiens
  Table A; HLA-A*25:01; SMARCA4; G1162S; 0
STRAGGLSL

SEQ ID NO: 18052 - protein, 9 aa, Homo sapiens
  Table A; HLA-A*30:01; SMARCA4; G1162S; 0
STRAGGLSL

SEQ ID NO: 18053 - protein, 9 aa, Homo sapiens
  Table A; HLA-B*07:02; SMARCA4; G1162S; 1
STRAGGLSL

SEQ ID NO: 18054 - protein, 9 aa, Homo sapiens
  Table A; HLA-B*08:01; SMARCA4; G1162S; 1
STRAGGLSL

SEQ ID NO: 18055 - protein, 9 aa, Homo sapiens
  Table A; HLA-B*13:02; SMARCA4; G1162S; 0
STRAGGLSL

SEQ ID NO: 18056 - protein, 9 aa, Homo sapiens
  Table A; HLA-B*15:01; SMARCA4; G1162S; 0
STRAGGLSL

SEQ ID NO: 18057 - protein, 9 aa, Homo sapiens
  Table A; HLA-B*15:02; SMARCA4; G1162S; 0
STRAGGLSL

SEQ ID NO: 18058 - protein, 9 aa, Homo sapiens
  Table A; HLA-B*39:01; SMARCA4; G1162S; 0
STRAGGLSL

SEQ ID NO: 18059 - protein, 9 aa, Homo sapiens
  Table A; HLA-B*46:01; SMARCA4; G1162S; 0
STRAGGLSL

SEQ ID NO: 18060 - protein, 9 aa, Homo sapiens
  Table A; HLA-B*58:01; SMARCA4; G1162S; 0
STRAGGLSL

SEQ ID NO: 18061 - protein, 9 aa, Homo sapiens
  Table A; HLA-C*01:02; SMARCA4; G1162S; 0
STRAGGLSL

SEQ ID NO: 18062 - protein, 9 aa, Homo sapiens
  Table A; HLA-C*03:02; SMARCA4; G1162S; 0
STRAGGLSL

SEQ ID NO: 18063 - protein, 9 aa, Homo sapiens
  Table A; HLA-C*03:03; SMARCA4; G1162S; 0
STRAGGLSL

SEQ ID NO: 18064 - protein, 9 aa, Homo sapiens
  Table A; HLA-C*03:04; SMARCA4; G1162S; 0
STRAGGLSL

SEQ ID NO: 18065 - protein, 9 aa, Homo sapiens
  Table A; HLA-C*15:02; SMARCA4; G1162S; 0
STRAGGLSL

SEQ ID NO: 18066 - protein, 9 aa, Homo sapiens
  Table A; HLA-C*16:01; SMARCA4; G1162S; 0
STRAGGLSL

SEQ ID NO: 18067 - protein, 11 aa, Homo sapiens
  Table A; HLA-A*30:01; SMARCA4; G1162S; 0
STRAGGLSLNL

SEQ ID NO: 18068 - protein, 11 aa, Homo sapiens
  Table A; HLA-A*31:01; SMARCA4; G1162S; 0
STRAGGLSLNL

SEQ ID NO: 18069 - protein, 11 aa, Homo sapiens
  Table A; HLA-B*54:01; PIK3CA; E545A; 0
STRDPLSEITA

SEQ ID NO: 18070 - protein, 11 aa, Homo sapiens
  Table A; HLA-A*03:01; PIK3CA; E545K; 1
STRDPLSEITK

SEQ ID NO: 18071 - protein, 11 aa, Homo sapiens
  Table A; HLA-A*03:02; PIK3CA; E545K; 0
STRDPLSEITK

SEQ ID NO: 18072 - protein, 11 aa, Homo sapiens
  Table A; HLA-A*11:01; PIK3CA; E545K; 1
STRDPLSEITK

SEQ ID NO: 18073 - protein, 11 aa, Homo sapiens
  Table A; HLA-A*30:01; PIK3CA; E545K; 1
STRDPLSEITK

SEQ ID NO: 18074 - protein, 11 aa, Homo sapiens
  Table A; HLA-A*31:01; PIK3CA; E545K; 1
STRDPLSEITK

SEQ ID NO: 18075 - protein, 11 aa, Homo sapiens
  Table A; HLA-A*33:03; PIK3CA; E545K; 0
STRDPLSEITK

SEQ ID NO: 18076 - protein, 11 aa, Homo sapiens
  Table A; HLA-A*68:01; PIK3CA; E545K; 1
STRDPLSEITK

SEQ ID NO: 18077 - protein, 8 aa, Homo sapiens
  Table A; HLA-A*03:01; PIK3CA; E542K; 1
STRDPLSK

SEQ ID NO: 18078 - protein, 8 aa, Homo sapiens
  Table A; HLA-A*03:02; PIK3CA; E542K; 0
STRDPLSK

SEQ ID NO: 18079 - protein, 8 aa, Homo sapiens
  Table A; HLA-A*11:01; PIK3CA; E542K; 1
STRDPLSK

SEQ ID NO: 18080 - protein, 9 aa, Homo sapiens
  Table A; HLA-A*02:03; PIK3CA; E542K; 0
STRDPLSKI

SEQ ID NO: 18081 - protein, 9 aa, Homo sapiens
  Table A; HLA-A*02:08; PIK3CA; E542K; 0
STRDPLSKI

SEQ ID NO: 18082 - protein, 9 aa, Homo sapiens
  Table A; HLA-A*25:01; PIK3CA; E542K; 1
STRDPLSKI

SEQ ID NO: 18083 - protein, 9 aa, Homo sapiens
  Table A; HLA-A*30:01; PIK3CA; E542K; 1
STRDPLSKI

SEQ ID NO: 18084 - protein, 9 aa, Homo sapiens
  Table A; HLA-A*68:02; PIK3CA; E542K; 1
STRDPLSKI

SEQ ID NO: 18085 - protein, 9 aa, Homo sapiens
  Table A; HLA-B*07:02; PIK3CA; E542K; 1
STRDPLSKI

SEQ ID NO: 18086 - protein, 9 aa, Homo sapiens
  Table A; HLA-B*57:01; PIK3CA; E542K; 1
STRDPLSKI

SEQ ID NO: 18087 - protein, 9 aa, Homo sapiens
  Table A; HLA-B*58:01; PIK3CA; E542K; 0
STRDPLSKI

SEQ ID NO: 18088 - protein, 11 aa, Homo sapiens
  Table A; HLA-A*31:01; PIK3CA; E542K; 1
STRDPLSKITE

SEQ ID NO: 18089 - protein, 8 aa, Homo sapiens
  Table A; HLA-C*15:02; PIK3CA; E542V; 0
STRDPLSV

SEQ ID NO: 18090 - protein, 9 aa, Homo sapiens
  Table A; HLA-A*02:03; PIK3CA; E542V; 0
STRDPLSVI

SEQ ID NO: 18091 - protein, 9 aa, Homo sapiens
  Table A; HLA-A*02:08; PIK3CA; E542V; 0
STRDPLSVI

SEQ ID NO: 18092 - protein, 9 aa, Homo sapiens
  Table A; HLA-A*25:01; PIK3CA; E542V; 0
STRDPLSVI

SEQ ID NO: 18093 - protein, 9 aa, Homo sapiens
  Table A; HLA-A*26:03; PIK3CA; E542V; 0
STRDPLSVI

SEQ ID NO: 18094 - protein, 9 aa, Homo sapiens
  Table A; HLA-A*30:01; PIK3CA; E542V; 0
STRDPLSVI

SEQ ID NO: 18095 - protein, 9 aa, Homo sapiens
  Table A; HLA-A*68:02; PIK3CA; E542V; 0
STRDPLSVI

SEQ ID NO: 18096 - protein, 9 aa, Homo sapiens
  Table A; HLA-B*07:02; PIK3CA; E542V; 1
STRDPLSVI

SEQ ID NO: 18097 - protein, 9 aa, Homo sapiens
  Table A; HLA-B*46:01; PIK3CA; E542V; 0
STRDPLSVI

SEQ ID NO: 18098 - protein, 9 aa, Homo sapiens
  Table A; HLA-B*57:01; PIK3CA; E542V; 0
STRDPLSVI

SEQ ID NO: 18099 - protein, 9 aa, Homo sapiens
  Table A; HLA-B*58:01; PIK3CA; E542V; 0
STRDPLSVI

SEQ ID NO: 18100 - protein, 9 aa, Homo sapiens
  Table A; HLA-C*02:02; PIK3CA; E542V; 0
STRDPLSVI

SEQ ID NO: 18101 - protein, 9 aa, Homo sapiens
  Table A; HLA-C*03:02; PIK3CA; E542V; 0
STRDPLSVI

SEQ ID NO: 18102 - protein, 9 aa, Homo sapiens
  Table A; HLA-C*12:03; PIK3CA; E542V; 0
STRDPLSVI

SEQ ID NO: 18103 - protein, 11 aa, Homo sapiens
  Table A; HLA-A*31:01; PIK3CA; E542V; 0
STRDPLSVITE

SEQ ID NO: 18104 - protein, 8 aa, Homo sapiens
  Table A; HLA-A*33:03; TP53; P151S; 0
STSPPGTR

SEQ ID NO: 18105 - protein, 8 aa, Homo sapiens
  Table A; HLA-C*08:03; TP53; P151S; 0
STSPPGTR

SEQ ID NO: 18106 - protein, 9 aa, Homo sapiens
  Table A; HLA-A*01:01; TP53; P151S; 1
STSPPGTRV

SEQ ID NO: 18107 - protein, 9 aa, Homo sapiens
  Table A; HLA-A*02:03; TP53; P151S; 0
STSPPGTRV

SEQ ID NO: 18108 - protein, 9 aa, Homo sapiens
  Table A; HLA-A*02:05; TP53; P151S; 0
STSPPGTRV

SEQ ID NO: 18109 - protein, 9 aa, Homo sapiens
  Table A; HLA-A*02:06; TP53; P151S; 0
STSPPGTRV

SEQ ID NO: 18110 - protein, 9 aa, Homo sapiens
  Table A; HLA-A*02:08; TP53; P151S; 0
STSPPGTRV

SEQ ID NO: 18111 - protein, 9 aa, Homo sapiens
  Table A; HLA-A*11:01; TP53; P151S; 0
STSPPGTRV

SEQ ID NO: 18112 - protein, 9 aa, Homo sapiens
  Table A; HLA-A*30:01; TP53; P151S; 0
STSPPGTRV

SEQ ID NO: 18113 - protein, 9 aa, Homo sapiens
  Table A; HLA-A*68:01; TP53; P151S; 0
STSPPGTRV

SEQ ID NO: 18114 - protein, 9 aa, Homo sapiens
  Table A; HLA-A*68:02; TP53; P151S; 0
STSPPGTRV

SEQ ID NO: 18115 - protein, 9 aa, Homo sapiens
  Table A; HLA-B*13:02; TP53; P151S; 0
STSPPGTRV

SEQ ID NO: 18116 - protein, 9 aa, Homo sapiens
  Table A; HLA-B*15:01; TP53; P151S; 1
STSPPGTRV

SEQ ID NO: 18117 - protein, 9 aa, Homo sapiens
  Table A; HLA-B*15:10; TP53; P151S; 0
STSPPGTRV

SEQ ID NO: 18118 - protein, 9 aa, Homo sapiens
  Table A; HLA-B*58:01; TP53; P151S; 0
STSPPGTRV

SEQ ID NO: 18119 - protein, 9 aa, Homo sapiens
  Table A; HLA-C*15:02; TP53; P151S; 0
STSPPGTRV

SEQ ID NO: 18120 - protein, 10 aa, Homo sapiens
  Table A; HLA-A*03:01; TP53; P151S; 1
STSPPGTRVR

SEQ ID NO: 18121 - protein, 10 aa, Homo sapiens
  Table A; HLA-A*03:02; TP53; P151S; 0
STSPPGTRVR

SEQ ID NO: 18122 - protein, 10 aa, Homo sapiens
  Table A; HLA-A*11:01; TP53; P151S; 0
STSPPGTRVR

SEQ ID NO: 18123 - protein, 10 aa, Homo sapiens
  Table A; HLA-A*26:03; TP53; P151S; 0
STSPPGTRVR

SEQ ID NO: 18124 - protein, 10 aa, Homo sapiens
  Table A; HLA-A*31:01; TP53; P151S; 0
STSPPGTRVR

SEQ ID NO: 18125 - protein, 10 aa, Homo sapiens
  Table A; HLA-A*33:03; TP53; P151S; 0
STSPPGTRVR

SEQ ID NO: 18126 - protein, 10 aa, Homo sapiens
  Table A; HLA-A*68:01; TP53; P151S; 0
STSPPGTRVR

SEQ ID NO: 18127 - protein, 10 aa, Homo sapiens
  Table A; HLA-A*68:02; TP53; P151S; 0
STSPPGTRVR

SEQ ID NO: 18128 - protein, 10 aa, Homo sapiens
  Table A; HLA-B*57:01; TP53; P151S; 0
STSPPGTRVR

SEQ ID NO: 18129 - protein, 11 aa, Homo sapiens
  Table A; HLA-A*11:01; TP53; P151S; 0
STSPPGTRVRA

SEQ ID NO: 18130 - protein, 11 aa, Homo sapiens
  Table A; HLA-A*68:02; TP53; P151S; 0
STSPPGTRVRA

SEQ ID NO: 18131 - protein, 8 aa, Homo sapiens
  Table A; HLA-A*03:01; CTCF; K365T; 1
SVEVSTLK

SEQ ID NO: 18132 - protein, 8 aa, Homo sapiens
  Table A; HLA-A*03:02; CTCF; K365T; 0
SVEVSTLK

SEQ ID NO: 18133 - protein, 8 aa, Homo sapiens
  Table A; HLA-A*11:01; CTCF; K365T; 1
SVEVSTLK

SEQ ID NO: 18134 - protein, 9 aa, Homo sapiens
  Table A; HLA-A*03:01; CTCF; K365T; 1
SVEVSTLKR

SEQ ID NO: 18135 - protein, 9 aa, Homo sapiens
  Table A; HLA-A*03:02; CTCF; K365T; 0
SVEVSTLKR

SEQ ID NO: 18136 - protein, 9 aa, Homo sapiens
  Table A; HLA-A*11:01; CTCF; K365T; 1
SVEVSTLKR

SEQ ID NO: 18137 - protein, 9 aa, Homo sapiens
  Table A; HLA-A*26:03; CTCF; K365T; 0
SVEVSTLKR

SEQ ID NO: 18138 - protein, 9 aa, Homo sapiens
  Table A; HLA-A*31:01; CTCF; K365T; 0
SVEVSTLKR

SEQ ID NO: 18139 - protein, 9 aa, Homo sapiens
  Table A; HLA-A*33:01; CTCF; K365T; 0
SVEVSTLKR

SEQ ID NO: 18140 - protein, 9 aa, Homo sapiens
  Table A; HLA-A*33:03; CTCF; K365T; 0
SVEVSTLKR

SEQ ID NO: 18141 - protein, 9 aa, Homo sapiens
  Table A; HLA-A*68:01; CTCF; K365T; 0
SVEVSTLKR

SEQ ID NO: 18142 - protein, 9 aa, Homo sapiens
  Table A; HLA-B*27:02; CTCF; K365T; 0
SVEVSTLKR

SEQ ID NO: 18143 - protein, 8 aa, Homo sapiens
  Table A; HLA-B*15:01; CTNNB1; G34V; 1
SVIHSGAT

SEQ ID NO: 18144 - protein, 8 aa, Homo sapiens
  Table A; HLA-C*08:03; CTNNB1; G34V; 0
SVIHSGAT

SEQ ID NO: 18145 - protein, 9 aa, Homo sapiens
  Table A; HLA-A*02:03; CTNNB1; G34V; 0
SVIHSGATT

SEQ ID NO: 18146 - protein, 9 aa, Homo sapiens
  Table A; HLA-A*02:05; CTNNB1; G34V; 0
SVIHSGATT

SEQ ID NO: 18147 - protein, 9 aa, Homo sapiens
  Table A; HLA-A*02:06; CTNNB1; G34V; 0
SVIHSGATT

SEQ ID NO: 18148 - protein, 9 aa, Homo sapiens
  Table A; HLA-A*02:08; CTNNB1; G34V; 0
SVIHSGATT

SEQ ID NO: 18149 - protein, 9 aa, Homo sapiens
  Table A; HLA-A*26:03; CTNNB1; G34V; 0
SVIHSGATT

SEQ ID NO: 18150 - protein, 9 aa, Homo sapiens
  Table A; HLA-A*30:01; CTNNB1; G34V; 0
SVIHSGATT

SEQ ID NO: 18151 - protein, 9 aa, Homo sapiens
  Table A; HLA-A*68:02; CTNNB1; G34V; 0
SVIHSGATT

SEQ ID NO: 18152 - protein, 9 aa, Homo sapiens
  Table A; HLA-B*07:02; CTNNB1; G34V; 1
SVIHSGATT

SEQ ID NO: 18153 - protein, 9 aa, Homo sapiens
  Table A; HLA-B*15:01; CTNNB1; G34V; 1
SVIHSGATT

SEQ ID NO: 18154 - protein, 9 aa, Homo sapiens
  Table A; HLA-B*48:01; CTNNB1; G34V; 0
SVIHSGATT

SEQ ID NO: 18155 - protein, 9 aa, Homo sapiens
  Table A; HLA-C*08:01; CTNNB1; G34V; 0
SVIHSGATT

SEQ ID NO: 18156 - protein, 10 aa, Homo sapiens
  Table A; HLA-A*02:03; CTNNB1; G34V; 0
SVIHSGATTT

SEQ ID NO: 18157 - protein, 10 aa, Homo sapiens
  Table A; HLA-A*02:05; CTNNB1; G34V; 0
SVIHSGATTT

SEQ ID NO: 18158 - protein, 10 aa, Homo sapiens
  Table A; HLA-A*02:06; CTNNB1; G34V; 0
SVIHSGATTT

SEQ ID NO: 18159 - protein, 10 aa, Homo sapiens
  Table A; HLA-A*02:08; CTNNB1; G34V; 0
SVIHSGATTT

SEQ ID NO: 18160 - protein, 10 aa, Homo sapiens
  Table A; HLA-A*11:01; CTNNB1; G34V; 1
SVIHSGATTT

SEQ ID NO: 18161 - protein, 10 aa, Homo sapiens
  Table A; HLA-A*26:03; CTNNB1; G34V; 0
SVIHSGATTT

SEQ ID NO: 18162 - protein, 10 aa, Homo sapiens
  Table A; HLA-A*31:01; CTNNB1; G34V; 0
SVIHSGATTT

SEQ ID NO: 18163 - protein, 10 aa, Homo sapiens
  Table A; HLA-A*68:01; CTNNB1; G34V; 0
SVIHSGATTT

SEQ ID NO: 18164 - protein, 10 aa, Homo sapiens
  Table A; HLA-A*68:02; CTNNB1; G34V; 0
SVIHSGATTT

SEQ ID NO: 18165 - protein, 10 aa, Homo sapiens
  Table A; HLA-B*15:01; CTNNB1; G34V; 1
SVIHSGATTT

SEQ ID NO: 18166 - protein, 10 aa, Homo sapiens
  Table A; HLA-B*48:01; CTNNB1; G34V; 0
SVIHSGATTT

SEQ ID NO: 18167 - protein, 10 aa, Homo sapiens
  Table A; HLA-C*08:03; CTNNB1; G34V; 0
SVIHSGATTT

SEQ ID NO: 18168 - protein, 11 aa, Homo sapiens
  Table A; HLA-A*02:03; CTNNB1; G34V; 0
SVIHSGATTTA

SEQ ID NO: 18169 - protein, 11 aa, Homo sapiens
  Table A; HLA-A*02:05; CTNNB1; G34V; 0
SVIHSGATTTA

SEQ ID NO: 18170 - protein, 11 aa, Homo sapiens
  Table A; HLA-A*02:06; CTNNB1; G34V; 0
SVIHSGATTTA

SEQ ID NO: 18171 - protein, 11 aa, Homo sapiens
  Table A; HLA-A*02:08; CTNNB1; G34V; 0
SVIHSGATTTA

SEQ ID NO: 18172 - protein, 11 aa, Homo sapiens
  Table A; HLA-A*11:01; CTNNB1; G34V; 1
SVIHSGATTTA

SEQ ID NO: 18173 - protein, 11 aa, Homo sapiens
  Table A; HLA-A*26:01; CTNNB1; G34V; 0
SVIHSGATTTA

SEQ ID NO: 18174 - protein, 11 aa, Homo sapiens
  Table A; HLA-A*26:03; CTNNB1; G34V; 0
SVIHSGATTTA

SEQ ID NO: 18175 - protein, 11 aa, Homo sapiens
  Table A; HLA-A*68:01; CTNNB1; G34V; 0
SVIHSGATTTA

SEQ ID NO: 18176 - protein, 11 aa, Homo sapiens
  Table A; HLA-A*68:02; CTNNB1; G34V; 0
SVIHSGATTTA

SEQ ID NO: 18177 - protein, 11 aa, Homo sapiens
  Table A; HLA-B*07:02; CTNNB1; G34V; 1
SVIHSGATTTA

SEQ ID NO: 18178 - protein, 11 aa, Homo sapiens
  Table A; HLA-B*15:01; CTNNB1; G34V; 1
SVIHSGATTTA

SEQ ID NO: 18179 - protein, 11 aa, Homo sapiens
  Table A; HLA-B*35:01; CTNNB1; G34V; 1
SVIHSGATTTA

SEQ ID NO: 18180 - protein, 11 aa, Homo sapiens
  Table A; HLA-B*39:06; CTNNB1; G34V; 0
SVIHSGATTTA

SEQ ID NO: 18181 - protein, 11 aa, Homo sapiens
  Table A; HLA-B*46:01; CTNNB1; G34V; 0
SVIHSGATTTA

SEQ ID NO: 18182 - protein, 11 aa, Homo sapiens
  Table A; HLA-B*48:01; CTNNB1; G34V; 0
SVIHSGATTTA

SEQ ID NO: 18183 - protein, 11 aa, Homo sapiens
  Table A; HLA-B*50:01; CTNNB1; G34V; 0
SVIHSGATTTA

SEQ ID NO: 18184 - protein, 11 aa, Homo sapiens
  Table A; HLA-B*54:01; CTNNB1; G34V; 0
SVIHSGATTTA

SEQ ID NO: 18185 - protein, 11 aa, Homo sapiens
  Table A; HLA-B*55:02; CTNNB1; G34V; 0
SVIHSGATTTA

SEQ ID NO: 18186 - protein, 11 aa, Homo sapiens
  Table A; HLA-B*56:01; CTNNB1; G34V; 0
SVIHSGATTTA

SEQ ID NO: 18187 - protein, 11 aa, Homo sapiens
  Table A; HLA-C*08:01; CTNNB1; G34V; 0
SVIHSGATTTA

SEQ ID NO: 18188 - protein, 11 aa, Homo sapiens
  Table A; HLA-A*02:05; PIK3CA; E542V; 0
SVITEQEKDFL

SEQ ID NO: 18189 - protein, 8 aa, Homo sapiens
  Table A; HLA-B*07:02; RAC1; A159V; 1
SVLTQRGL

SEQ ID NO: 18190 - protein, 8 aa, Homo sapiens
  Table A; HLA-B*08:01; RAC1; A159V; 1
SVLTQRGL

SEQ ID NO: 18191 - protein, 8 aa, Homo sapiens
  Table A; HLA-B*13:02; RAC1; A159V; 0
SVLTQRGL

SEQ ID NO: 18192 - protein, 8 aa, Homo sapiens
  Table A; HLA-B*15:01; RAC1; A159V; 0
SVLTQRGL

SEQ ID NO: 18193 - protein, 8 aa, Homo sapiens
  Table A; HLA-B*27:05; RAC1; A159V; 0
SVLTQRGL

SEQ ID NO: 18194 - protein, 8 aa, Homo sapiens
  Table A; HLA-B*40:02; RAC1; A159V; 0
SVLTQRGL

SEQ ID NO: 18195 - protein, 8 aa, Homo sapiens
  Table A; HLA-B*48:01; RAC1; A159V; 0
SVLTQRGL

SEQ ID NO: 18196 - protein, 9 aa, Homo sapiens
  Table A; HLA-A*03:01; RAC1; A159V; 1
SVLTQRGLK

SEQ ID NO: 18197 - protein, 9 aa, Homo sapiens
  Table A; HLA-A*03:02; RAC1; A159V; 0
SVLTQRGLK

SEQ ID NO: 18198 - protein, 9 aa, Homo sapiens
  Table A; HLA-A*11:01; RAC1; A159V; 0
SVLTQRGLK

SEQ ID NO: 18199 - protein, 9 aa, Homo sapiens
  Table A; HLA-A*31:01; RAC1; A159V; 0
SVLTQRGLK

SEQ ID NO: 18200 - protein, 10 aa, Homo sapiens
  Table A; HLA-A*31:01; RAC1; A159V; 0
SVLTQRGLKT

SEQ ID NO: 18201 - protein, 11 aa, Homo sapiens
  Table A; HLA-A*02:01; RAC1; A159V; 1
SVLTQRGLKTV

SEQ ID NO: 18202 - protein, 11 aa, Homo sapiens
  Table A; HLA-A*02:03; RAC1; A159V; 0
SVLTQRGLKTV

SEQ ID NO: 18203 - protein, 11 aa, Homo sapiens
  Table A; HLA-A*02:04; RAC1; A159V; 0
SVLTQRGLKTV

SEQ ID NO: 18204 - protein, 11 aa, Homo sapiens
  Table A; HLA-A*02:06; RAC1; A159V; 0
SVLTQRGLKTV

SEQ ID NO: 18205 - protein, 11 aa, Homo sapiens
  Table A; HLA-A*02:08; RAC1; A159V; 0
SVLTQRGLKTV

SEQ ID NO: 18206 - protein, 9 aa, Homo sapiens
  Table A; HLA-A*25:01; RGPD3; N756D; 0
SVMQELEDY

SEQ ID NO: 18207 - protein, 9 aa, Homo sapiens
  Table A; HLA-A*26:01; RGPD3; N756D; 0
SVMQELEDY

SEQ ID NO: 18208 - protein, 9 aa, Homo sapiens
  Table A; HLA-A*29:01; RGPD3; N756D; 0
SVMQELEDY

SEQ ID NO: 18209 - protein, 9 aa, Homo sapiens
  Table A; HLA-A*30:02; RGPD3; N756D; 0
SVMQELEDY

SEQ ID NO: 18210 - protein, 9 aa, Homo sapiens
  Table A; HLA-B*15:01; RGPD3; N756D; 1
SVMQELEDY

SEQ ID NO: 18211 - protein, 9 aa, Homo sapiens
  Table A; HLA-B*15:02; RGPD3; N756D; 0
SVMQELEDY

SEQ ID NO: 18212 - protein, 9 aa, Homo sapiens
  Table A; HLA-B*35:01; RGPD3; N756D; 1
SVMQELEDY

SEQ ID NO: 18213 - protein, 9 aa, Homo sapiens
  Table A; HLA-B*35:08; RGPD3; N756D; 0
SVMQELEDY

SEQ ID NO: 18214 - protein, 10 aa, Homo sapiens
  Table A; HLA-A*25:01; TP53; G262V; 0
SVNLLGRNSF

SEQ ID NO: 18215 - protein, 10 aa, Homo sapiens
  Table A; HLA-A*32:01; TP53; G262V; 0
SVNLLGRNSF

SEQ ID NO: 18216 - protein, 10 aa, Homo sapiens
  Table A; HLA-B*07:02; TP53; G262V; 1
SVNLLGRNSF

SEQ ID NO: 18217 - protein, 10 aa, Homo sapiens
  Table A; HLA-B*15:01; TP53; G262V; 0
SVNLLGRNSF

SEQ ID NO: 18218 - protein, 10 aa, Homo sapiens
  Table A; HLA-B*57:01; TP53; G262V; 0
SVNLLGRNSF

SEQ ID NO: 18219 - protein, 8 aa, Homo sapiens
  Table A; HLA-B*15:01; BRAF; G466V; 1
SVSFGTVY

SEQ ID NO: 18220 - protein, 8 aa, Homo sapiens
  Table A; HLA-B*15:02; BRAF; G466V; 0
SVSFGTVY

SEQ ID NO: 18221 - protein, 9 aa, Homo sapiens
  Table A; HLA-A*03:01; BRAF; G466V; 1
SVSFGTVYK

SEQ ID NO: 18222 - protein, 9 aa, Homo sapiens
  Table A; HLA-A*03:02; BRAF; G466V; 0
SVSFGTVYK

SEQ ID NO: 18223 - protein, 9 aa, Homo sapiens
  Table A; HLA-A*11:01; BRAF; G466V; 1
SVSFGTVYK

SEQ ID NO: 18224 - protein, 9 aa, Homo sapiens
  Table A; HLA-A*68:01; BRAF; G466V; 0
SVSFGTVYK

SEQ ID NO: 18225 - protein, 9 aa, Homo sapiens
  Table A; HLA-A*26:03; CNTNAP2; R283H; 0
SVVIEHQGR

SEQ ID NO: 18226 - protein, 9 aa, Homo sapiens
  Table A; HLA-A*31:01; CNTNAP2; R283H; 0
SVVIEHQGR

SEQ ID NO: 18227 - protein, 9 aa, Homo sapiens
  Table A; HLA-A*33:03; CNTNAP2; R283H; 0
SVVIEHQGR

SEQ ID NO: 18228 - protein, 9 aa, Homo sapiens
  Table A; HLA-A*68:01; CNTNAP2; R283H; 0
SVVIEHQGR

SEQ ID NO: 18229 - protein, 9 aa, Homo sapiens
  Table A; HLA-B*27:02; CNTNAP2; R283H; 0
SVVIEHQGR

SEQ ID NO: 18230 - protein, 8 aa, Homo sapiens
  Table A; HLA-A*23:01; TP53; R110L; 0
SYGFLLGF

SEQ ID NO: 18231 - protein, 8 aa, Homo sapiens
  Table A; HLA-C*14:02; TP53; R110L; 0
SYGFLLGF

SEQ ID NO: 18232 - protein, 9 aa, Homo sapiens
  Table A; HLA-A*02:04; TP53; R110L; 0
SYGFLLGFL

SEQ ID NO: 18233 - protein, 10 aa, Homo sapiens
  Table A; HLA-A*23:01; MAP2K1; P124S; 0
SYIVGFYGAF

SEQ ID NO: 18234 - protein, 10 aa, Homo sapiens
  Table A; HLA-A*24:02; MAP2K1; P124S; 1
SYIVGFYGAF

SEQ ID NO: 18235 - protein, 10 aa, Homo sapiens
  Table A; HLA-A*29:02; MAP2K1; P124S; 1
SYIVGFYGAF

SEQ ID NO: 18236 - protein, 10 aa, Homo sapiens
  Table A; HLA-C*14:02; MAP2K1; P124S; 0
SYIVGFYGAF

SEQ ID NO: 18237 - protein, 9 aa, Homo sapiens
  Table A; HLA-A*23:01; CTNNB1; S33F; 0
SYLDFGIHS

SEQ ID NO: 18238 - protein, 9 aa, Homo sapiens
  Table A; HLA-A*31:01; CTNNB1; S33F; 1
SYLDFGIHS

SEQ ID NO: 18239 - protein, 9 aa, Homo sapiens
  Table A; HLA-A*33:03; CTNNB1; S33F; 0
SYLDFGIHS

SEQ ID NO: 18240 - protein, 10 aa, Homo sapiens
  Table A; HLA-A*02:04; CTNNB1; S33F; 0
SYLDFGIHSG

SEQ ID NO: 18241 - protein, 10 aa, Homo sapiens
  Table A; HLA-A*11:01; CTNNB1; S33F; 1
SYLDFGIHSG

SEQ ID NO: 18242 - protein, 10 aa, Homo sapiens
  Table A; HLA-A*23:01; CTNNB1; S33F; 0
SYLDFGIHSG

SEQ ID NO: 18243 - protein, 10 aa, Homo sapiens
  Table A; HLA-A*30:01; CTNNB1; S33F; 0
SYLDFGIHSG

SEQ ID NO: 18244 - protein, 10 aa, Homo sapiens
  Table A; HLA-A*31:01; CTNNB1; S33F; 1
SYLDFGIHSG

SEQ ID NO: 18245 - protein, 10 aa, Homo sapiens
  Table A; HLA-A*33:01; CTNNB1; S33F; 0
SYLDFGIHSG

SEQ ID NO: 18246 - protein, 10 aa, Homo sapiens
  Table A; HLA-A*33:03; CTNNB1; S33F; 0
SYLDFGIHSG

SEQ ID NO: 18247 - protein, 10 aa, Homo sapiens
  Table A; HLA-A*68:02; CTNNB1; S33F; 0
SYLDFGIHSG

SEQ ID NO: 18248 - protein, 10 aa, Homo sapiens
  Table A; HLA-B*39:01; CTNNB1; S33F; 0
SYLDFGIHSG

SEQ ID NO: 18249 - protein, 10 aa, Homo sapiens
  Table A; HLA-C*14:02; CTNNB1; S33F; 0
SYLDFGIHSG

SEQ ID NO: 18250 - protein, 10 aa, Homo sapiens
  Table A; HLA-C*14:03; CTNNB1; S33F; 0
SYLDFGIHSG

SEQ ID NO: 18251 - protein, 11 aa, Homo sapiens
  Table A; HLA-A*31:01; CTNNB1; S33F; 1
SYLDFGIHSGA

SEQ ID NO: 18252 - protein, 10 aa, Homo sapiens
  Table A; HLA-A*23:01; CTNNB1; G34E; 0
SYLDSEIHSG

SEQ ID NO: 18253 - protein, 10 aa, Homo sapiens
  Table A; HLA-A*29:02; CTNNB1; G34E; 0
SYLDSEIHSG

SEQ ID NO: 18254 - protein, 10 aa, Homo sapiens
  Table A; HLA-A*31:01; CTNNB1; G34E; 0
SYLDSEIHSG

SEQ ID NO: 18255 - protein, 10 aa, Homo sapiens
  Table A; HLA-A*33:01; CTNNB1; G34E; 0
SYLDSEIHSG

SEQ ID NO: 18256 - protein, 10 aa, Homo sapiens
  Table A; HLA-A*33:03; CTNNB1; G34E; 0
SYLDSEIHSG

SEQ ID NO: 18257 - protein, 10 aa, Homo sapiens
  Table A; HLA-B*39:01; CTNNB1; G34E; 0
SYLDSEIHSG

SEQ ID NO: 18258 - protein, 10 aa, Homo sapiens
  Table A; HLA-B*48:01; CTNNB1; G34E; 0
SYLDSEIHSG

SEQ ID NO: 18259 - protein, 10 aa, Homo sapiens
  Table A; HLA-C*08:03; CTNNB1; G34E; 0
SYLDSEIHSG

SEQ ID NO: 18260 - protein, 11 aa, Homo sapiens
  Table A; HLA-A*02:01; CTNNB1; G34E; 1
SYLDSEIHSGA

SEQ ID NO: 18261 - protein, 11 aa, Homo sapiens
  Table A; HLA-A*29:02; CTNNB1; G34E; 0
SYLDSEIHSGA

SEQ ID NO: 18262 - protein, 11 aa, Homo sapiens
  Table A; HLA-A*30:01; CTNNB1; G34E; 0
SYLDSEIHSGA

SEQ ID NO: 18263 - protein, 11 aa, Homo sapiens
  Table A; HLA-A*31:01; CTNNB1; G34E; 0
SYLDSEIHSGA

SEQ ID NO: 18264 - protein, 11 aa, Homo sapiens
  Table A; HLA-A*33:01; CTNNB1; G34E; 0
SYLDSEIHSGA

SEQ ID NO: 18265 - protein, 11 aa, Homo sapiens
  Table A; HLA-A*33:03; CTNNB1; G34E; 0
SYLDSEIHSGA

SEQ ID NO: 18266 - protein, 11 aa, Homo sapiens
  Table A; HLA-B*27:02; CTNNB1; G34E; 0
SYLDSEIHSGA

SEQ ID NO: 18267 - protein, 11 aa, Homo sapiens
  Table A; HLA-B*39:01; CTNNB1; G34E; 0
SYLDSEIHSGA

SEQ ID NO: 18268 - protein, 11 aa, Homo sapiens
  Table A; HLA-B*39:06; CTNNB1; G34E; 0
SYLDSEIHSGA

SEQ ID NO: 18269 - protein, 11 aa, Homo sapiens
  Table A; HLA-B*48:01; CTNNB1; G34E; 0
SYLDSEIHSGA

SEQ ID NO: 18270 - protein, 11 aa, Homo sapiens
  Table A; HLA-C*08:03; CTNNB1; G34E; 0
SYLDSEIHSGA

SEQ ID NO: 18271 - protein, 9 aa, Homo sapiens
  Table A; HLA-A*23:01; CTNNB1; S37A; 0
SYLDSGIHA

SEQ ID NO: 18272 - protein, 9 aa, Homo sapiens
  Table A; HLA-A*30:01; CTNNB1; S37A; 0
SYLDSGIHA

SEQ ID NO: 18273 - protein, 9 aa, Homo sapiens
  Table A; HLA-A*31:01; CTNNB1; S37A; 0
SYLDSGIHA

SEQ ID NO: 18274 - protein, 9 aa, Homo sapiens
  Table A; HLA-A*33:03; CTNNB1; S37A; 0
SYLDSGIHA

SEQ ID NO: 18275 - protein, 9 aa, Homo sapiens
  Table A; HLA-B*15:02; CTNNB1; S37A; 0
SYLDSGIHA

SEQ ID NO: 18276 - protein, 9 aa, Homo sapiens
  Table A; HLA-B*15:10; CTNNB1; S37A; 0
SYLDSGIHA

SEQ ID NO: 18277 - protein, 9 aa, Homo sapiens
  Table A; HLA-B*39:01; CTNNB1; S37A; 0
SYLDSGIHA

SEQ ID NO: 18278 - protein, 9 aa, Homo sapiens
  Table A; HLA-B*39:06; CTNNB1; S37A; 0
SYLDSGIHA

SEQ ID NO: 18279 - protein, 9 aa, Homo sapiens
  Table A; HLA-B*48:01; CTNNB1; S37A; 0
SYLDSGIHA

SEQ ID NO: 18280 - protein, 9 aa, Homo sapiens
  Table A; HLA-B*54:01; CTNNB1; S37A; 0
SYLDSGIHA

SEQ ID NO: 18281 - protein, 9 aa, Homo sapiens
  Table A; HLA-C*14:02; CTNNB1; S37A; 0
SYLDSGIHA

SEQ ID NO: 18282 - protein, 9 aa, Homo sapiens
  Table A; HLA-C*14:03; CTNNB1; S37A; 0
SYLDSGIHA

SEQ ID NO: 18283 - protein, 10 aa, Homo sapiens
  Table A; HLA-A*02:01; CTNNB1; S37A; 1
SYLDSGIHAG

SEQ ID NO: 18284 - protein, 10 aa, Homo sapiens
  Table A; HLA-A*02:04; CTNNB1; S37A; 0
SYLDSGIHAG

SEQ ID NO: 18285 - protein, 10 aa, Homo sapiens
  Table A; HLA-A*02:06; CTNNB1; S37A; 0
SYLDSGIHAG

SEQ ID NO: 18286 - protein, 10 aa, Homo sapiens
  Table A; HLA-A*11:01; CTNNB1; S37A; 1
SYLDSGIHAG

SEQ ID NO: 18287 - protein, 10 aa, Homo sapiens
  Table A; HLA-A*23:01; CTNNB1; S37A; 0
SYLDSGIHAG

SEQ ID NO: 18288 - protein, 10 aa, Homo sapiens
  Table A; HLA-A*26:01; CTNNB1; S37A; 0
SYLDSGIHAG

SEQ ID NO: 18289 - protein, 10 aa, Homo sapiens
  Table A; HLA-A*29:02; CTNNB1; S37A; 0
SYLDSGIHAG

SEQ ID NO: 18290 - protein, 10 aa, Homo sapiens
  Table A; HLA-A*30:01; CTNNB1; S37A; 0
SYLDSGIHAG

SEQ ID NO: 18291 - protein, 10 aa, Homo sapiens
  Table A; HLA-A*31:01; CTNNB1; S37A; 0
SYLDSGIHAG

SEQ ID NO: 18292 - protein, 10 aa, Homo sapiens
  Table A; HLA-A*33:01; CTNNB1; S37A; 0
SYLDSGIHAG

SEQ ID NO: 18293 - protein, 10 aa, Homo sapiens
  Table A; HLA-A*33:03; CTNNB1; S37A; 0
SYLDSGIHAG

SEQ ID NO: 18294 - protein, 10 aa, Homo sapiens
  Table A; HLA-A*68:01; CTNNB1; S37A; 0
SYLDSGIHAG

SEQ ID NO: 18295 - protein, 10 aa, Homo sapiens
  Table A; HLA-A*68:02; CTNNB1; S37A; 0
SYLDSGIHAG

SEQ ID NO: 18296 - protein, 10 aa, Homo sapiens
  Table A; HLA-B*27:02; CTNNB1; S37A; 0
SYLDSGIHAG

SEQ ID NO: 18297 - protein, 10 aa, Homo sapiens
  Table A; HLA-B*27:05; CTNNB1; S37A; 0
SYLDSGIHAG

SEQ ID NO: 18298 - protein, 10 aa, Homo sapiens
  Table A; HLA-B*39:01; CTNNB1; S37A; 0
SYLDSGIHAG

SEQ ID NO: 18299 - protein, 10 aa, Homo sapiens
  Table A; HLA-B*39:06; CTNNB1; S37A; 0
SYLDSGIHAG

SEQ ID NO: 18300 - protein, 10 aa, Homo sapiens
  Table A; HLA-B*48:01; CTNNB1; S37A; 0
SYLDSGIHAG

SEQ ID NO: 18301 - protein, 10 aa, Homo sapiens
  Table A; HLA-C*14:02; CTNNB1; S37A; 0
SYLDSGIHAG

SEQ ID NO: 18302 - protein, 10 aa, Homo sapiens
  Table A; HLA-C*14:03; CTNNB1; S37A; 0
SYLDSGIHAG

SEQ ID NO: 18303 - protein, 11 aa, Homo sapiens
  Table A; HLA-A*02:01; CTNNB1; S37A; 1
SYLDSGIHAGA

SEQ ID NO: 18304 - protein, 11 aa, Homo sapiens
  Table A; HLA-A*11:01; CTNNB1; S37A; 1
SYLDSGIHAGA

SEQ ID NO: 18305 - protein, 11 aa, Homo sapiens
  Table A; HLA-A*23:01; CTNNB1; S37A; 0
SYLDSGIHAGA

SEQ ID NO: 18306 - protein, 11 aa, Homo sapiens
  Table A; HLA-A*29:02; CTNNB1; S37A; 0
SYLDSGIHAGA

SEQ ID NO: 18307 - protein, 11 aa, Homo sapiens
  Table A; HLA-A*30:01; CTNNB1; S37A; 0
SYLDSGIHAGA

SEQ ID NO: 18308 - protein, 11 aa, Homo sapiens
  Table A; HLA-A*31:01; CTNNB1; S37A; 0
SYLDSGIHAGA

SEQ ID NO: 18309 - protein, 11 aa, Homo sapiens
  Table A; HLA-A*33:01; CTNNB1; S37A; 0
SYLDSGIHAGA

SEQ ID NO: 18310 - protein, 11 aa, Homo sapiens
  Table A; HLA-A*33:03; CTNNB1; S37A; 0
SYLDSGIHAGA

SEQ ID NO: 18311 - protein, 11 aa, Homo sapiens
  Table A; HLA-B*27:02; CTNNB1; S37A; 0
SYLDSGIHAGA

SEQ ID NO: 18312 - protein, 11 aa, Homo sapiens
  Table A; HLA-B*27:05; CTNNB1; S37A; 0
SYLDSGIHAGA

SEQ ID NO: 18313 - protein, 11 aa, Homo sapiens
  Table A; HLA-B*39:01; CTNNB1; S37A; 0
SYLDSGIHAGA

SEQ ID NO: 18314 - protein, 11 aa, Homo sapiens
  Table A; HLA-B*39:06; CTNNB1; S37A; 0
SYLDSGIHAGA

SEQ ID NO: 18315 - protein, 11 aa, Homo sapiens
  Table A; HLA-B*48:01; CTNNB1; S37A; 0
SYLDSGIHAGA

SEQ ID NO: 18316 - protein, 9 aa, Homo sapiens
  Table A; HLA-A*23:01; CTNNB1; S37C; 1
SYLDSGIHC

SEQ ID NO: 18317 - protein, 9 aa, Homo sapiens
  Table A; HLA-A*33:03; CTNNB1; S37C; 0
SYLDSGIHC

SEQ ID NO: 18318 - protein, 9 aa, Homo sapiens
  Table A; HLA-B*39:01; CTNNB1; S37C; 0
SYLDSGIHC

SEQ ID NO: 18319 - protein, 9 aa, Homo sapiens
  Table A; HLA-C*14:02; CTNNB1; S37C; 0
SYLDSGIHC

SEQ ID NO: 18320 - protein, 9 aa, Homo sapiens
  Table A; HLA-C*14:03; CTNNB1; S37C; 0
SYLDSGIHC

SEQ ID NO: 18321 - protein, 10 aa, Homo sapiens
  Table A; HLA-A*02:01; CTNNB1; S37C; 1
SYLDSGIHCG

SEQ ID NO: 18322 - protein, 10 aa, Homo sapiens
  Table A; HLA-A*02:04; CTNNB1; S37C; 0
SYLDSGIHCG

SEQ ID NO: 18323 - protein, 10 aa, Homo sapiens
  Table A; HLA-A*02:06; CTNNB1; S37C; 0
SYLDSGIHCG

SEQ ID NO: 18324 - protein, 10 aa, Homo sapiens
  Table A; HLA-A*11:01; CTNNB1; S37C; 1
SYLDSGIHCG

SEQ ID NO: 18325 - protein, 10 aa, Homo sapiens
  Table A; HLA-A*23:01; CTNNB1; S37C; 1
SYLDSGIHCG

SEQ ID NO: 18326 - protein, 10 aa, Homo sapiens
  Table A; HLA-A*30:01; CTNNB1; S37C; 0
SYLDSGIHCG

SEQ ID NO: 18327 - protein, 10 aa, Homo sapiens
  Table A; HLA-A*31:01; CTNNB1; S37C; 1
SYLDSGIHCG

SEQ ID NO: 18328 - protein, 10 aa, Homo sapiens
  Table A; HLA-A*33:01; CTNNB1; S37C; 0
SYLDSGIHCG

SEQ ID NO: 18329 - protein, 10 aa, Homo sapiens
  Table A; HLA-A*33:03; CTNNB1; S37C; 0
SYLDSGIHCG

SEQ ID NO: 18330 - protein, 10 aa, Homo sapiens
  Table A; HLA-A*68:01; CTNNB1; S37C; 1
SYLDSGIHCG

SEQ ID NO: 18331 - protein, 10 aa, Homo sapiens
  Table A; HLA-A*68:02; CTNNB1; S37C; 0
SYLDSGIHCG

SEQ ID NO: 18332 - protein, 10 aa, Homo sapiens
  Table A; HLA-B*27:05; CTNNB1; S37C; 1
SYLDSGIHCG

SEQ ID NO: 18333 - protein, 10 aa, Homo sapiens
  Table A; HLA-B*39:01; CTNNB1; S37C; 0
SYLDSGIHCG

SEQ ID NO: 18334 - protein, 10 aa, Homo sapiens
  Table A; HLA-B*48:01; CTNNB1; S37C; 0
SYLDSGIHCG

SEQ ID NO: 18335 - protein, 10 aa, Homo sapiens
  Table A; HLA-C*08:03; CTNNB1; S37C; 0
SYLDSGIHCG

SEQ ID NO: 18336 - protein, 10 aa, Homo sapiens
  Table A; HLA-C*14:03; CTNNB1; S37C; 0
SYLDSGIHCG

SEQ ID NO: 18337 - protein, 11 aa, Homo sapiens
  Table A; HLA-A*02:01; CTNNB1; S37C; 1
SYLDSGIHCGA

SEQ ID NO: 18338 - protein, 11 aa, Homo sapiens
  Table A; HLA-A*31:01; CTNNB1; S37C; 1
SYLDSGIHCGA

SEQ ID NO: 18339 - protein, 11 aa, Homo sapiens
  Table A; HLA-A*33:01; CTNNB1; S37C; 0
SYLDSGIHCGA

SEQ ID NO: 18340 - protein, 11 aa, Homo sapiens
  Table A; HLA-A*33:03; CTNNB1; S37C; 0
SYLDSGIHCGA

SEQ ID NO: 18341 - protein, 11 aa, Homo sapiens
  Table A; HLA-B*27:05; CTNNB1; S37C; 1
SYLDSGIHCGA

SEQ ID NO: 18342 - protein, 11 aa, Homo sapiens
  Table A; HLA-B*48:01; CTNNB1; S37C; 0
SYLDSGIHCGA

SEQ ID NO: 18343 - protein, 9 aa, Homo sapiens
  Table A; HLA-A*02:04; CTNNB1; S37F; 0
SYLDSGIHF

SEQ ID NO: 18344 - protein, 9 aa, Homo sapiens
  Table A; HLA-A*23:01; CTNNB1; S37F; 1
SYLDSGIHF

SEQ ID NO: 18345 - protein, 9 aa, Homo sapiens
  Table A; HLA-A*24:02; CTNNB1; S37F; 1
SYLDSGIHF

SEQ ID NO: 18346 - protein, 9 aa, Homo sapiens
  Table A; HLA-A*29:02; CTNNB1; S37F; 1
SYLDSGIHF

SEQ ID NO: 18347 - protein, 9 aa, Homo sapiens
  Table A; HLA-A*30:01; CTNNB1; S37F; 0
SYLDSGIHF

SEQ ID NO: 18348 - protein, 9 aa, Homo sapiens
  Table A; HLA-A*31:01; CTNNB1; S37F; 1
SYLDSGIHF

SEQ ID NO: 18349 - protein, 9 aa, Homo sapiens
  Table A; HLA-A*33:03; CTNNB1; S37F; 0
SYLDSGIHF

SEQ ID NO: 18350 - protein, 9 aa, Homo sapiens
  Table A; HLA-B*15:01; CTNNB1; S37F; 1
SYLDSGIHF

SEQ ID NO: 18351 - protein, 9 aa, Homo sapiens
  Table A; HLA-B*15:02; CTNNB1; S37F; 0
SYLDSGIHF

SEQ ID NO: 18352 - protein, 9 aa, Homo sapiens
  Table A; HLA-B*15:03; CTNNB1; S37F; 0
SYLDSGIHF

SEQ ID NO: 18353 - protein, 9 aa, Homo sapiens
  Table A; HLA-B*35:01; CTNNB1; S37F; 1
SYLDSGIHF

SEQ ID NO: 18354 - protein, 9 aa, Homo sapiens
  Table A; HLA-B*38:01; CTNNB1; S37F; 1
SYLDSGIHF

SEQ ID NO: 18355 - protein, 9 aa, Homo sapiens
  Table A; HLA-B*39:01; CTNNB1; S37F; 0
SYLDSGIHF

SEQ ID NO: 18356 - protein, 9 aa, Homo sapiens
  Table A; HLA-B*44:05; CTNNB1; S37F; 0
SYLDSGIHF

SEQ ID NO: 18357 - protein, 9 aa, Homo sapiens
  Table A; HLA-B*48:01; CTNNB1; S37F; 0
SYLDSGIHF

SEQ ID NO: 18358 - protein, 9 aa, Homo sapiens
  Table A; HLA-C*04:01; CTNNB1; S37F; 1
SYLDSGIHF

SEQ ID NO: 18359 - protein, 9 aa, Homo sapiens
  Table A; HLA-C*07:02; CTNNB1; S37F; 1
SYLDSGIHF

SEQ ID NO: 18360 - protein, 9 aa, Homo sapiens
  Table A; HLA-C*14:02; CTNNB1; S37F; 0
SYLDSGIHF

SEQ ID NO: 18361 - protein, 9 aa, Homo sapiens
  Table A; HLA-C*14:03; CTNNB1; S37F; 0
SYLDSGIHF

SEQ ID NO: 18362 - protein, 10 aa, Homo sapiens
  Table A; HLA-A*23:01; CTNNB1; S37F; 1
SYLDSGIHFG

SEQ ID NO: 18363 - protein, 10 aa, Homo sapiens
  Table A; HLA-A*29:02; CTNNB1; S37F; 1
SYLDSGIHFG

SEQ ID NO: 18364 - protein, 10 aa, Homo sapiens
  Table A; HLA-A*31:01; CTNNB1; S37F; 1
SYLDSGIHFG

SEQ ID NO: 18365 - protein, 10 aa, Homo sapiens
  Table A; HLA-A*33:01; CTNNB1; S37F; 0
SYLDSGIHFG

SEQ ID NO: 18366 - protein, 10 aa, Homo sapiens
  Table A; HLA-A*33:03; CTNNB1; S37F; 0
SYLDSGIHFG

SEQ ID NO: 18367 - protein, 10 aa, Homo sapiens
  Table A; HLA-A*68:02; CTNNB1; S37F; 0
SYLDSGIHFG

SEQ ID NO: 18368 - protein, 11 aa, Homo sapiens
  Table A; HLA-A*02:01; CTNNB1; S37F; 1
SYLDSGIHFGA

SEQ ID NO: 18369 - protein, 11 aa, Homo sapiens
  Table A; HLA-A*23:01; CTNNB1; S37F; 1
SYLDSGIHFGA

SEQ ID NO: 18370 - protein, 11 aa, Homo sapiens
  Table A; HLA-A*29:02; CTNNB1; S37F; 1
SYLDSGIHFGA

SEQ ID NO: 18371 - protein, 11 aa, Homo sapiens
  Table A; HLA-A*30:01; CTNNB1; S37F; 0
SYLDSGIHFGA

SEQ ID NO: 18372 - protein, 11 aa, Homo sapiens
  Table A; HLA-A*31:01; CTNNB1; S37F; 1
SYLDSGIHFGA

SEQ ID NO: 18373 - protein, 11 aa, Homo sapiens
  Table A; HLA-A*33:01; CTNNB1; S37F; 0
SYLDSGIHFGA

SEQ ID NO: 18374 - protein, 11 aa, Homo sapiens
  Table A; HLA-A*33:03; CTNNB1; S37F; 0
SYLDSGIHFGA

SEQ ID NO: 18375 - protein, 11 aa, Homo sapiens
  Table A; HLA-B*48:01; CTNNB1; S37F; 0
SYLDSGIHFGA

SEQ ID NO: 18376 - protein, 9 aa, Homo sapiens
  Table A; HLA-A*31:01; CTNNB1; S37P; 0
SYLDSGIHP

SEQ ID NO: 18377 - protein, 9 aa, Homo sapiens
  Table A; HLA-A*33:01; CTNNB1; S37P; 0
SYLDSGIHP

SEQ ID NO: 18378 - protein, 9 aa, Homo sapiens
  Table A; HLA-A*33:03; CTNNB1; S37P; 0
SYLDSGIHP

SEQ ID NO: 18379 - protein, 9 aa, Homo sapiens
  Table A; HLA-C*14:02; CTNNB1; S37P; 0
SYLDSGIHP

SEQ ID NO: 18380 - protein, 10 aa, Homo sapiens
  Table A; HLA-A*02:01; CTNNB1; S37P; 1
SYLDSGIHPG

SEQ ID NO: 18381 - protein, 10 aa, Homo sapiens
  Table A; HLA-A*02:06; CTNNB1; S37P; 0
SYLDSGIHPG

SEQ ID NO: 18382 - protein, 10 aa, Homo sapiens
  Table A; HLA-A*11:01; CTNNB1; S37P; 0
SYLDSGIHPG

SEQ ID NO: 18383 - protein, 10 aa, Homo sapiens
  Table A; HLA-A*29:02; CTNNB1; S37P; 0
SYLDSGIHPG

SEQ ID NO: 18384 - protein, 10 aa, Homo sapiens
  Table A; HLA-A*30:01; CTNNB1; S37P; 0
SYLDSGIHPG

SEQ ID NO: 18385 - protein, 10 aa, Homo sapiens
  Table A; HLA-A*31:01; CTNNB1; S37P; 0
SYLDSGIHPG

SEQ ID NO: 18386 - protein, 10 aa, Homo sapiens
  Table A; HLA-A*33:01; CTNNB1; S37P; 0
SYLDSGIHPG

SEQ ID NO: 18387 - protein, 10 aa, Homo sapiens
  Table A; HLA-A*33:03; CTNNB1; S37P; 0
SYLDSGIHPG

SEQ ID NO: 18388 - protein, 10 aa, Homo sapiens
  Table A; HLA-A*68:01; CTNNB1; S37P; 0
SYLDSGIHPG

SEQ ID NO: 18389 - protein, 10 aa, Homo sapiens
  Table A; HLA-A*68:02; CTNNB1; S37P; 0
SYLDSGIHPG

SEQ ID NO: 18390 - protein, 10 aa, Homo sapiens
  Table A; HLA-B*27:02; CTNNB1; S37P; 0
SYLDSGIHPG

SEQ ID NO: 18391 - protein, 10 aa, Homo sapiens
  Table A; HLA-B*39:01; CTNNB1; S37P; 0
SYLDSGIHPG

SEQ ID NO: 18392 - protein, 10 aa, Homo sapiens
  Table A; HLA-B*48:01; CTNNB1; S37P; 0
SYLDSGIHPG

SEQ ID NO: 18393 - protein, 10 aa, Homo sapiens
  Table A; HLA-C*08:03; CTNNB1; S37P; 0
SYLDSGIHPG

SEQ ID NO: 18394 - protein, 11 aa, Homo sapiens
  Table A; HLA-A*23:01; CTNNB1; S37P; 0
SYLDSGIHPGA

SEQ ID NO: 18395 - protein, 11 aa, Homo sapiens
  Table A; HLA-A*29:02; CTNNB1; S37P; 0
SYLDSGIHPGA

SEQ ID NO: 18396 - protein, 11 aa, Homo sapiens
  Table A; HLA-A*30:01; CTNNB1; S37P; 0
SYLDSGIHPGA

SEQ ID NO: 18397 - protein, 11 aa, Homo sapiens
  Table A; HLA-A*31:01; CTNNB1; S37P; 0
SYLDSGIHPGA

SEQ ID NO: 18398 - protein, 11 aa, Homo sapiens
  Table A; HLA-A*33:01; CTNNB1; S37P; 0
SYLDSGIHPGA

SEQ ID NO: 18399 - protein, 11 aa, Homo sapiens
  Table A; HLA-A*33:03; CTNNB1; S37P; 0
SYLDSGIHPGA

SEQ ID NO: 18400 - protein, 11 aa, Homo sapiens
  Table A; HLA-B*27:05; CTNNB1; S37P; 0
SYLDSGIHPGA

SEQ ID NO: 18401 - protein, 11 aa, Homo sapiens
  Table A; HLA-B*48:01; CTNNB1; S37P; 0
SYLDSGIHPGA

SEQ ID NO: 18402 - protein, 8 aa, Homo sapiens
  Table A; HLA-C*14:02; CTNNB1; G34R; 0
SYLDSRIH

SEQ ID NO: 18403 - protein, 9 aa, Homo sapiens
  Table A; HLA-A*23:01; CTNNB1; G34R; 0
SYLDSRIHS

SEQ ID NO: 18404 - protein, 9 aa, Homo sapiens
  Table A; HLA-A*31:01; CTNNB1; G34R; 1
SYLDSRIHS

SEQ ID NO: 18405 - protein, 9 aa, Homo sapiens
  Table A; HLA-A*33:01; CTNNB1; G34R; 0
SYLDSRIHS

SEQ ID NO: 18406 - protein, 9 aa, Homo sapiens
  Table A; HLA-A*33:03; CTNNB1; G34R; 0
SYLDSRIHS

SEQ ID NO: 18407 - protein, 9 aa, Homo sapiens
  Table A; HLA-C*14:02; CTNNB1; G34R; 0
SYLDSRIHS

SEQ ID NO: 18408 - protein, 10 aa, Homo sapiens
  Table A; HLA-A*23:01; CTNNB1; G34R; 0
SYLDSRIHSG

SEQ ID NO: 18409 - protein, 10 aa, Homo sapiens
  Table A; HLA-A*24:02; CTNNB1; G34R; 1
SYLDSRIHSG

SEQ ID NO: 18410 - protein, 10 aa, Homo sapiens
  Table A; HLA-A*29:02; CTNNB1; G34R; 1
SYLDSRIHSG

SEQ ID NO: 18411 - protein, 10 aa, Homo sapiens
  Table A; HLA-A*31:01; CTNNB1; G34R; 1
SYLDSRIHSG

SEQ ID NO: 18412 - protein, 10 aa, Homo sapiens
  Table A; HLA-A*33:01; CTNNB1; G34R; 0
SYLDSRIHSG

SEQ ID NO: 18413 - protein, 10 aa, Homo sapiens
  Table A; HLA-A*33:03; CTNNB1; G34R; 0
SYLDSRIHSG

SEQ ID NO: 18414 - protein, 10 aa, Homo sapiens
  Table A; HLA-C*14:02; CTNNB1; G34R; 0
SYLDSRIHSG

SEQ ID NO: 18415 - protein, 11 aa, Homo sapiens
  Table A; HLA-A*30:01; CTNNB1; G34R; 0
SYLDSRIHSGA

SEQ ID NO: 18416 - protein, 11 aa, Homo sapiens
  Table A; HLA-A*31:01; CTNNB1; G34R; 1
SYLDSRIHSGA

SEQ ID NO: 18417 - protein, 11 aa, Homo sapiens
  Table A; HLA-A*33:03; CTNNB1; G34R; 0
SYLDSRIHSGA

SEQ ID NO: 18418 - protein, 11 aa, Homo sapiens
  Table A; HLA-C*08:03; CTNNB1; G34R; 0
SYLDSRIHSGA

SEQ ID NO: 18419 - protein, 8 aa, Homo sapiens
  Table A; HLA-A*33:03; CTNNB1; G34V; 0
SYLDSVIH

SEQ ID NO: 18420 - protein, 8 aa, Homo sapiens
  Table A; HLA-B*48:01; CTNNB1; G34V; 0
SYLDSVIH

SEQ ID NO: 18421 - protein, 8 aa, Homo sapiens
  Table A; HLA-C*08:03; CTNNB1; G34V; 0
SYLDSVIH

SEQ ID NO: 18422 - protein, 8 aa, Homo sapiens
  Table A; HLA-C*14:02; CTNNB1; G34V; 0
SYLDSVIH

SEQ ID NO: 18423 - protein, 9 aa, Homo sapiens
  Table A; HLA-A*11:01; CTNNB1; G34V; 1
SYLDSVIHS

SEQ ID NO: 18424 - protein, 9 aa, Homo sapiens
  Table A; HLA-A*23:01; CTNNB1; G34V; 0
SYLDSVIHS

SEQ ID NO: 18425 - protein, 9 aa, Homo sapiens
  Table A; HLA-A*24:02; CTNNB1; G34V; 1
SYLDSVIHS

SEQ ID NO: 18426 - protein, 9 aa, Homo sapiens
  Table A; HLA-A*31:01; CTNNB1; G34V; 0
SYLDSVIHS

SEQ ID NO: 18427 - protein, 9 aa, Homo sapiens
  Table A; HLA-A*33:01; CTNNB1; G34V; 0
SYLDSVIHS

SEQ ID NO: 18428 - protein, 9 aa, Homo sapiens
  Table A; HLA-A*33:03; CTNNB1; G34V; 0
SYLDSVIHS

SEQ ID NO: 18429 - protein, 9 aa, Homo sapiens
  Table A; HLA-B*48:01; CTNNB1; G34V; 0
SYLDSVIHS

SEQ ID NO: 18430 - protein, 9 aa, Homo sapiens
  Table A; HLA-C*14:03; CTNNB1; G34V; 0
SYLDSVIHS

SEQ ID NO: 18431 - protein, 10 aa, Homo sapiens
  Table A; HLA-A*02:01; CTNNB1; G34V; 1
SYLDSVIHSG

SEQ ID NO: 18432 - protein, 10 aa, Homo sapiens
  Table A; HLA-A*02:04; CTNNB1; G34V; 0
SYLDSVIHSG

SEQ ID NO: 18433 - protein, 10 aa, Homo sapiens
  Table A; HLA-A*11:01; CTNNB1; G34V; 1
SYLDSVIHSG

SEQ ID NO: 18434 - protein, 10 aa, Homo sapiens
  Table A; HLA-A*23:01; CTNNB1; G34V; 0
SYLDSVIHSG

SEQ ID NO: 18435 - protein, 10 aa, Homo sapiens
  Table A; HLA-A*24:02; CTNNB1; G34V; 1
SYLDSVIHSG

SEQ ID NO: 18436 - protein, 10 aa, Homo sapiens
  Table A; HLA-A*29:02; CTNNB1; G34V; 1
SYLDSVIHSG

SEQ ID NO: 18437 - protein, 10 aa, Homo sapiens
  Table A; HLA-A*30:01; CTNNB1; G34V; 0
SYLDSVIHSG

SEQ ID NO: 18438 - protein, 10 aa, Homo sapiens
  Table A; HLA-A*31:01; CTNNB1; G34V; 0
SYLDSVIHSG

SEQ ID NO: 18439 - protein, 10 aa, Homo sapiens
  Table A; HLA-A*33:01; CTNNB1; G34V; 0
SYLDSVIHSG

SEQ ID NO: 18440 - protein, 10 aa, Homo sapiens
  Table A; HLA-A*33:03; CTNNB1; G34V; 0
SYLDSVIHSG

SEQ ID NO: 18441 - protein, 10 aa, Homo sapiens
  Table A; HLA-A*68:02; CTNNB1; G34V; 0
SYLDSVIHSG

SEQ ID NO: 18442 - protein, 10 aa, Homo sapiens
  Table A; HLA-B*27:02; CTNNB1; G34V; 0
SYLDSVIHSG

SEQ ID NO: 18443 - protein, 10 aa, Homo sapiens
  Table A; HLA-B*27:05; CTNNB1; G34V; 1
SYLDSVIHSG

SEQ ID NO: 18444 - protein, 10 aa, Homo sapiens
  Table A; HLA-B*39:01; CTNNB1; G34V; 0
SYLDSVIHSG

SEQ ID NO: 18445 - protein, 10 aa, Homo sapiens
  Table A; HLA-B*48:01; CTNNB1; G34V; 0
SYLDSVIHSG

SEQ ID NO: 18446 - protein, 10 aa, Homo sapiens
  Table A; HLA-C*08:03; CTNNB1; G34V; 0
SYLDSVIHSG

SEQ ID NO: 18447 - protein, 10 aa, Homo sapiens
  Table A; HLA-C*14:02; CTNNB1; G34V; 0
SYLDSVIHSG

SEQ ID NO: 18448 - protein, 10 aa, Homo sapiens
  Table A; HLA-C*14:03; CTNNB1; G34V; 0
SYLDSVIHSG

SEQ ID NO: 18449 - protein, 11 aa, Homo sapiens
  Table A; HLA-A*02:01; CTNNB1; G34V; 1
SYLDSVIHSGA

SEQ ID NO: 18450 - protein, 11 aa, Homo sapiens
  Table A; HLA-A*30:01; CTNNB1; G34V; 0
SYLDSVIHSGA

SEQ ID NO: 18451 - protein, 11 aa, Homo sapiens
  Table A; HLA-A*31:01; CTNNB1; G34V; 0
SYLDSVIHSGA

SEQ ID NO: 18452 - protein, 11 aa, Homo sapiens
  Table A; HLA-A*33:03; CTNNB1; G34V; 0
SYLDSVIHSGA

SEQ ID NO: 18453 - protein, 11 aa, Homo sapiens
  Table A; HLA-B*39:06; CTNNB1; G34V; 0
SYLDSVIHSGA

SEQ ID NO: 18454 - protein, 11 aa, Homo sapiens
  Table A; HLA-B*48:01; CTNNB1; G34V; 0
SYLDSVIHSGA

SEQ ID NO: 18455 - protein, 11 aa, Homo sapiens
  Table A; HLA-B*54:01; CTNNB1; G34V; 0
SYLDSVIHSGA

SEQ ID NO: 18456 - protein, 11 aa, Homo sapiens
  Table A; HLA-C*08:03; CTNNB1; G34V; 0
SYLDSVIHSGA

SEQ ID NO: 18457 - protein, 9 aa, Homo sapiens
  Table A; HLA-A*23:01; CTNNB1; S33Y; 0
SYLDYGIHS

SEQ ID NO: 18458 - protein, 9 aa, Homo sapiens
  Table A; HLA-A*31:01; CTNNB1; S33Y; 0
SYLDYGIHS

SEQ ID NO: 18459 - protein, 9 aa, Homo sapiens
  Table A; HLA-A*33:03; CTNNB1; S33Y; 0
SYLDYGIHS

SEQ ID NO: 18460 - protein, 10 aa, Homo sapiens
  Table A; HLA-A*02:01; CTNNB1; S33Y; 1
SYLDYGIHSG

SEQ ID NO: 18461 - protein, 10 aa, Homo sapiens
  Table A; HLA-A*02:04; CTNNB1; S33Y; 0
SYLDYGIHSG

SEQ ID NO: 18462 - protein, 10 aa, Homo sapiens
  Table A; HLA-A*11:01; CTNNB1; S33Y; 1
SYLDYGIHSG

SEQ ID NO: 18463 - protein, 10 aa, Homo sapiens
  Table A; HLA-A*23:01; CTNNB1; S33Y; 0
SYLDYGIHSG

SEQ ID NO: 18464 - protein, 10 aa, Homo sapiens
  Table A; HLA-A*31:01; CTNNB1; S33Y; 0
SYLDYGIHSG

SEQ ID NO: 18465 - protein, 10 aa, Homo sapiens
  Table A; HLA-A*33:01; CTNNB1; S33Y; 0
SYLDYGIHSG

SEQ ID NO: 18466 - protein, 10 aa, Homo sapiens
  Table A; HLA-A*33:03; CTNNB1; S33Y; 0
SYLDYGIHSG

SEQ ID NO: 18467 - protein, 10 aa, Homo sapiens
  Table A; HLA-B*39:01; CTNNB1; S33Y; 0
SYLDYGIHSG

SEQ ID NO: 18468 - protein, 10 aa, Homo sapiens
  Table A; HLA-C*08:03; CTNNB1; S33Y; 0
SYLDYGIHSG

SEQ ID NO: 18469 - protein, 10 aa, Homo sapiens
  Table A; HLA-C*14:03; CTNNB1; S33Y; 0
SYLDYGIHSG

SEQ ID NO: 18470 - protein, 11 aa, Homo sapiens
  Table A; HLA-A*29:02; CTNNB1; S33Y; 1
SYLDYGIHSGA

SEQ ID NO: 18471 - protein, 11 aa, Homo sapiens
  Table A; HLA-A*31:01; CTNNB1; S33Y; 0
SYLDYGIHSGA

SEQ ID NO: 18472 - protein, 11 aa, Homo sapiens
  Table A; HLA-A*33:01; CTNNB1; S33Y; 0
SYLDYGIHSGA

SEQ ID NO: 18473 - protein, 11 aa, Homo sapiens
  Table A; HLA-A*33:03; CTNNB1; S33Y; 0
SYLDYGIHSGA

SEQ ID NO: 18474 - protein, 11 aa, Homo sapiens
  Table A; HLA-B*48:01; CTNNB1; S33Y; 0
SYLDYGIHSGA

SEQ ID NO: 18475 - protein, 9 aa, Homo sapiens
  Table A; HLA-A*02:04; ERBB2; V842I; 0
SYLEDVRLI

SEQ ID NO: 18476 - protein, 9 aa, Homo sapiens
  Table A; HLA-A*23:01; ERBB2; V842I; 0
SYLEDVRLI

SEQ ID NO: 18477 - protein, 9 aa, Homo sapiens
  Table A; HLA-A*24:02; ERBB2; V842I; 1
SYLEDVRLI

SEQ ID NO: 18478 - protein, 9 aa, Homo sapiens
  Table A; HLA-B*44:05; ERBB2; V842I; 0
SYLEDVRLI

SEQ ID NO: 18479 - protein, 9 aa, Homo sapiens
  Table A; HLA-B*50:01; ERBB2; V842I; 0
SYLEDVRLI

SEQ ID NO: 18480 - protein, 9 aa, Homo sapiens
  Table A; HLA-B*57:01; ERBB2; V842I; 0
SYLEDVRLI

SEQ ID NO: 18481 - protein, 9 aa, Homo sapiens
  Table A; HLA-C*06:02; ERBB2; V842I; 1
SYLEDVRLI

SEQ ID NO: 18482 - protein, 9 aa, Homo sapiens
  Table A; HLA-C*14:02; ERBB2; V842I; 0
SYLEDVRLI

SEQ ID NO: 18483 - protein, 9 aa, Homo sapiens
  Table A; HLA-C*14:03; ERBB2; V842I; 0
SYLEDVRLI

SEQ ID NO: 18484 - protein, 11 aa, Homo sapiens
  Table A; HLA-A*31:01; ERBB2; V842I; 0
SYLEDVRLIHR

SEQ ID NO: 18485 - protein, 11 aa, Homo sapiens
  Table A; HLA-A*33:01; ERBB2; V842I; 0
SYLEDVRLIHR

SEQ ID NO: 18486 - protein, 11 aa, Homo sapiens
  Table A; HLA-A*33:03; ERBB2; V842I; 0
SYLEDVRLIHR

SEQ ID NO: 18487 - protein, 9 aa, Homo sapiens
  Table A; HLA-A*31:01; CTNNB1; D32H; 0
SYLHSGIHS

SEQ ID NO: 18488 - protein, 9 aa, Homo sapiens
  Table A; HLA-A*33:03; CTNNB1; D32H; 0
SYLHSGIHS

SEQ ID NO: 18489 - protein, 10 aa, Homo sapiens
  Table A; HLA-A*02:01; CTNNB1; D32H; 1
SYLHSGIHSG

SEQ ID NO: 18490 - protein, 10 aa, Homo sapiens
  Table A; HLA-A*31:01; CTNNB1; D32H; 0
SYLHSGIHSG

SEQ ID NO: 18491 - protein, 10 aa, Homo sapiens
  Table A; HLA-A*33:01; CTNNB1; D32H; 0
SYLHSGIHSG

SEQ ID NO: 18492 - protein, 10 aa, Homo sapiens
  Table A; HLA-A*33:03; CTNNB1; D32H; 0
SYLHSGIHSG

SEQ ID NO: 18493 - protein, 11 aa, Homo sapiens
  Table A; HLA-A*31:01; CTNNB1; D32H; 0
SYLHSGIHSGA

SEQ ID NO: 18494 - protein, 11 aa, Homo sapiens
  Table A; HLA-A*33:03; CTNNB1; D32H; 0
SYLHSGIHSGA

SEQ ID NO: 18495 - protein, 9 aa, Homo sapiens
  Table A; HLA-A*23:01; CTNNB1; D32N; 0
SYLNSGIHS

SEQ ID NO: 18496 - protein, 9 aa, Homo sapiens
  Table A; HLA-A*31:01; CTNNB1; D32N; 1
SYLNSGIHS

SEQ ID NO: 18497 - protein, 9 aa, Homo sapiens
  Table A; HLA-A*33:03; CTNNB1; D32N; 0
SYLNSGIHS

SEQ ID NO: 18498 - protein, 9 aa, Homo sapiens
  Table A; HLA-C*14:02; CTNNB1; D32N; 0
SYLNSGIHS

SEQ ID NO: 18499 - protein, 10 aa, Homo sapiens
  Table A; HLA-A*11:01; CTNNB1; D32N; 1
SYLNSGIHSG

SEQ ID NO: 18500 - protein, 10 aa, Homo sapiens
  Table A; HLA-A*23:01; CTNNB1; D32N; 0
SYLNSGIHSG

SEQ ID NO: 18501 - protein, 10 aa, Homo sapiens
  Table A; HLA-A*29:02; CTNNB1; D32N; 1
SYLNSGIHSG

SEQ ID NO: 18502 - protein, 10 aa, Homo sapiens
  Table A; HLA-A*30:01; CTNNB1; D32N; 0
SYLNSGIHSG

SEQ ID NO: 18503 - protein, 10 aa, Homo sapiens
  Table A; HLA-A*31:01; CTNNB1; D32N; 1
SYLNSGIHSG

SEQ ID NO: 18504 - protein, 10 aa, Homo sapiens
  Table A; HLA-A*33:01; CTNNB1; D32N; 0
SYLNSGIHSG

SEQ ID NO: 18505 - protein, 10 aa, Homo sapiens
  Table A; HLA-A*33:03; CTNNB1; D32N; 0
SYLNSGIHSG

SEQ ID NO: 18506 - protein, 10 aa, Homo sapiens
  Table A; HLA-B*39:01; CTNNB1; D32N; 0
SYLNSGIHSG

SEQ ID NO: 18507 - protein, 10 aa, Homo sapiens
  Table A; HLA-B*48:01; CTNNB1; D32N; 0
SYLNSGIHSG

SEQ ID NO: 18508 - protein, 11 aa, Homo sapiens
  Table A; HLA-A*30:01; CTNNB1; D32N; 0
SYLNSGIHSGA

SEQ ID NO: 18509 - protein, 11 aa, Homo sapiens
  Table A; HLA-A*31:01; CTNNB1; D32N; 1
SYLNSGIHSGA

SEQ ID NO: 18510 - protein, 11 aa, Homo sapiens
  Table A; HLA-A*33:03; CTNNB1; D32N; 0
SYLNSGIHSGA

SEQ ID NO: 18511 - protein, 11 aa, Homo sapiens
  Table A; HLA-B*48:01; CTNNB1; D32N; 0
SYLNSGIHSGA

SEQ ID NO: 18512 - protein, 8 aa, Homo sapiens
  Table A; HLA-A*23:01; EP300; D1399N; 0
SYLNSVHF

SEQ ID NO: 18513 - protein, 8 aa, Homo sapiens
  Table A; HLA-A*24:02; EP300; D1399N; 1
SYLNSVHF

SEQ ID NO: 18514 - protein, 8 aa, Homo sapiens
  Table A; HLA-C*14:02; EP300; D1399N; 0
SYLNSVHF

SEQ ID NO: 18515 - protein, 8 aa, Homo sapiens
  Table A; HLA-C*14:03; EP300; D1399N; 0
SYLNSVHF

SEQ ID NO: 18516 - protein, 9 aa, Homo sapiens
  Table A; HLA-A*02:04; EP300; D1399N; 0
SYLNSVHFF

SEQ ID NO: 18517 - protein, 9 aa, Homo sapiens
  Table A; HLA-A*23:01; EP300; D1399N; 0
SYLNSVHFF

SEQ ID NO: 18518 - protein, 9 aa, Homo sapiens
  Table A; HLA-A*24:02; EP300; D1399N; 1
SYLNSVHFF

SEQ ID NO: 18519 - protein, 9 aa, Homo sapiens
  Table A; HLA-A*29:02; EP300; D1399N; 1
SYLNSVHFF

SEQ ID NO: 18520 - protein, 9 aa, Homo sapiens
  Table A; HLA-C*07:02; EP300; D1399N; 1
SYLNSVHFF

SEQ ID NO: 18521 - protein, 9 aa, Homo sapiens
  Table A; HLA-C*14:02; EP300; D1399N; 0
SYLNSVHFF

SEQ ID NO: 18522 - protein, 9 aa, Homo sapiens
  Table A; HLA-C*14:03; EP300; D1399N; 0
SYLNSVHFF

SEQ ID NO: 18523 - protein, 10 aa, Homo sapiens
  Table A; HLA-A*31:01; EP300; D1399N; 1
SYLNSVHFFR

SEQ ID NO: 18524 - protein, 9 aa, Homo sapiens
  Table A; HLA-A*31:01; CTNNB1; D32V; 1
SYLVSGIHS

SEQ ID NO: 18525 - protein, 9 aa, Homo sapiens
  Table A; HLA-A*33:03; CTNNB1; D32V; 0
SYLVSGIHS

SEQ ID NO: 18526 - protein, 9 aa, Homo sapiens
  Table A; HLA-C*14:02; CTNNB1; D32V; 0
SYLVSGIHS

SEQ ID NO: 18527 - protein, 10 aa, Homo sapiens
  Table A; HLA-A*02:01; CTNNB1; D32V; 1
SYLVSGIHSG

SEQ ID NO: 18528 - protein, 10 aa, Homo sapiens
  Table A; HLA-A*31:01; CTNNB1; D32V; 1
SYLVSGIHSG

SEQ ID NO: 18529 - protein, 10 aa, Homo sapiens
  Table A; HLA-A*33:01; CTNNB1; D32V; 0
SYLVSGIHSG

SEQ ID NO: 18530 - protein, 10 aa, Homo sapiens
  Table A; HLA-A*33:03; CTNNB1; D32V; 0
SYLVSGIHSG

SEQ ID NO: 18531 - protein, 10 aa, Homo sapiens
  Table A; HLA-B*39:01; CTNNB1; D32V; 0
SYLVSGIHSG

SEQ ID NO: 18532 - protein, 10 aa, Homo sapiens
  Table A; HLA-B*39:06; CTNNB1; D32V; 0
SYLVSGIHSG

SEQ ID NO: 18533 - protein, 10 aa, Homo sapiens
  Table A; HLA-B*48:01; CTNNB1; D32V; 0
SYLVSGIHSG

SEQ ID NO: 18534 - protein, 11 aa, Homo sapiens
  Table A; HLA-A*30:01; CTNNB1; D32V; 0
SYLVSGIHSGA

SEQ ID NO: 18535 - protein, 11 aa, Homo sapiens
  Table A; HLA-A*31:01; CTNNB1; D32V; 1
SYLVSGIHSGA

SEQ ID NO: 18536 - protein, 11 aa, Homo sapiens
  Table A; HLA-A*33:01; CTNNB1; D32V; 0
SYLVSGIHSGA

SEQ ID NO: 18537 - protein, 11 aa, Homo sapiens
  Table A; HLA-A*33:03; CTNNB1; D32V; 0
SYLVSGIHSGA

SEQ ID NO: 18538 - protein, 11 aa, Homo sapiens
  Table A; HLA-B*48:01; CTNNB1; D32V; 0
SYLVSGIHSGA

SEQ ID NO: 18539 - protein, 9 aa, Homo sapiens
  Table A; HLA-A*31:01; CTNNB1; D32Y; 0
SYLYSGIHS

SEQ ID NO: 18540 - protein, 9 aa, Homo sapiens
  Table A; HLA-A*33:03; CTNNB1; D32Y; 0
SYLYSGIHS

SEQ ID NO: 18541 - protein, 10 aa, Homo sapiens
  Table A; HLA-A*31:01; CTNNB1; D32Y; 0
SYLYSGIHSG

SEQ ID NO: 18542 - protein, 10 aa, Homo sapiens
  Table A; HLA-A*33:03; CTNNB1; D32Y; 0
SYLYSGIHSG

SEQ ID NO: 18543 - protein, 11 aa, Homo sapiens
  Table A; HLA-A*30:01; CTNNB1; D32Y; 0
SYLYSGIHSGA

SEQ ID NO: 18544 - protein, 11 aa, Homo sapiens
  Table A; HLA-A*31:01; CTNNB1; D32Y; 0
SYLYSGIHSGA

SEQ ID NO: 18545 - protein, 11 aa, Homo sapiens
  Table A; HLA-A*33:01; CTNNB1; D32Y; 0
SYLYSGIHSGA

SEQ ID NO: 18546 - protein, 11 aa, Homo sapiens
  Table A; HLA-A*33:03; CTNNB1; D32Y; 0
SYLYSGIHSGA

SEQ ID NO: 18547 - protein, 8 aa, Homo sapiens
  Table A; HLA-A*23:01; RAC1; P29L; 0
SYTTNAFL

SEQ ID NO: 18548 - protein, 8 aa, Homo sapiens
  Table A; HLA-A*24:02; RAC1; P29L; 1
SYTTNAFL

SEQ ID NO: 18549 - protein, 8 aa, Homo sapiens
  Table A; HLA-C*14:02; RAC1; P29L; 0
SYTTNAFL

SEQ ID NO: 18550 - protein, 8 aa, Homo sapiens
  Table A; HLA-C*14:03; RAC1; P29L; 0
SYTTNAFL

SEQ ID NO: 18551 - protein, 11 aa, Homo sapiens
  Table A; HLA-A*29:02; RAC1; P29L; 0
SYTTNAFLGEY

SEQ ID NO: 18552 - protein, 11 aa, Homo sapiens
  Table A; HLA-A*29:01; RAC1; P29S; 0
SYTTNAFSGEY

SEQ ID NO: 18553 - protein, 11 aa, Homo sapiens
  Table A; HLA-A*29:02; RAC1; P29S; 1
SYTTNAFSGEY

SEQ ID NO: 18554 - protein, 10 aa, Homo sapiens
  Table A; HLA-A*31:01; PCBP1; L100Q; 0
TAASRPPVTQ

SEQ ID NO: 18555 - protein, 10 aa, Homo sapiens
  Table A; HLA-A*33:01; PCBP1; L100Q; 0
TAASRPPVTQ

SEQ ID NO: 18556 - protein, 10 aa, Homo sapiens
  Table A; HLA-A*33:03; PCBP1; L100Q; 0
TAASRPPVTQ

SEQ ID NO: 18557 - protein, 10 aa, Homo sapiens
  Table A; HLA-A*68:01; PCBP1; L100Q; 0
TAASRPPVTQ

SEQ ID NO: 18558 - protein, 10 aa, Homo sapiens
  Table A; HLA-A*68:02; PCBP1; L100Q; 0
TAASRPPVTQ

SEQ ID NO: 18559 - protein, 10 aa, Homo sapiens
  Table A; HLA-B*07:02; PCBP1; L100Q; 1
TAASRPPVTQ

SEQ ID NO: 18560 - protein, 10 aa, Homo sapiens
  Table A; HLA-B*08:01; PCBP1; L100Q; 1
TAASRPPVTQ

SEQ ID NO: 18561 - protein, 10 aa, Homo sapiens
  Table A; HLA-B*27:05; PCBP1; L100Q; 0
TAASRPPVTQ

SEQ ID NO: 18562 - protein, 10 aa, Homo sapiens
  Table A; HLA-B*54:01; PCBP1; L100Q; 0
TAASRPPVTQ

SEQ ID NO: 18563 - protein, 10 aa, Homo sapiens
  Table A; HLA-C*08:03; PCBP1; L100Q; 0
TAASRPPVTQ

SEQ ID NO: 18564 - protein, 11 aa, Homo sapiens
  Table A; HLA-A*03:01; PCBP1; L100Q; 1
TAASRPPVTQR

SEQ ID NO: 18565 - protein, 11 aa, Homo sapiens
  Table A; HLA-A*03:02; PCBP1; L100Q; 0
TAASRPPVTQR

SEQ ID NO: 18566 - protein, 11 aa, Homo sapiens
  Table A; HLA-A*11:01; PCBP1; L100Q; 1
TAASRPPVTQR

SEQ ID NO: 18567 - protein, 11 aa, Homo sapiens
  Table A; HLA-A*26:03; PCBP1; L100Q; 0
TAASRPPVTQR

SEQ ID NO: 18568 - protein, 11 aa, Homo sapiens
  Table A; HLA-A*31:01; PCBP1; L100Q; 0
TAASRPPVTQR

SEQ ID NO: 18569 - protein, 11 aa, Homo sapiens
  Table A; HLA-A*33:01; PCBP1; L100Q; 0
TAASRPPVTQR

SEQ ID NO: 18570 - protein, 11 aa, Homo sapiens
  Table A; HLA-A*33:03; PCBP1; L100Q; 0
TAASRPPVTQR

SEQ ID NO: 18571 - protein, 11 aa, Homo sapiens
  Table A; HLA-A*68:01; PCBP1; L100Q; 0
TAASRPPVTQR

SEQ ID NO: 18572 - protein, 11 aa, Homo sapiens
  Table A; HLA-A*68:02; PCBP1; L100Q; 0
TAASRPPVTQR

SEQ ID NO: 18573 - protein, 11 aa, Homo sapiens
  Table A; HLA-B*35:01; PCBP1; L100Q; 1
TAASRPPVTQR

SEQ ID NO: 18574 - protein, 11 aa, Homo sapiens
  Table A; HLA-C*03:02; PCBP1; L100Q; 0
TAASRPPVTQR

SEQ ID NO: 18575 - protein, 10 aa, Homo sapiens
  Table A; HLA-B*35:03; CSMD3; R1529H; 0
TACHDPGVPM

SEQ ID NO: 18576 - protein, 9 aa, Homo sapiens
  Table A; HLA-B*35:02; KRAS; Q61H; 0
TAGHEEYSA

SEQ ID NO: 18577 - protein, 9 aa, Homo sapiens
  Table A; HLA-B*54:01; KRAS; Q61H; 0
TAGHEEYSA

SEQ ID NO: 18578 - protein, 9 aa, Homo sapiens
  Table A; HLA-B*35:02; NRAS; Q61H; 0
TAGHEEYSA

SEQ ID NO: 18579 - protein, 9 aa, Homo sapiens
  Table A; HLA-B*35:03; NRAS; Q61H; 0
TAGHEEYSA

SEQ ID NO: 18580 - protein, 9 aa, Homo sapiens
  Table A; HLA-B*54:01; NRAS; Q61H; 0
TAGHEEYSA

SEQ ID NO: 18581 - protein, 10 aa, Homo sapiens
  Table A; HLA-B*35:01; KRAS; Q61H; 1
TAGHEEYSAM

SEQ ID NO: 18582 - protein, 10 aa, Homo sapiens
  Table A; HLA-B*35:03; KRAS; Q61H; 1
TAGHEEYSAM

SEQ ID NO: 18583 - protein, 10 aa, Homo sapiens
  Table A; HLA-B*35:08; KRAS; Q61H; 0
TAGHEEYSAM

SEQ ID NO: 18584 - protein, 10 aa, Homo sapiens
  Table A; HLA-B*35:01; NRAS; Q61H; 1
TAGHEEYSAM

SEQ ID NO: 18585 - protein, 10 aa, Homo sapiens
  Table A; HLA-B*35:03; NRAS; Q61H; 0
TAGHEEYSAM

SEQ ID NO: 18586 - protein, 10 aa, Homo sapiens
  Table A; HLA-B*35:08; NRAS; Q61H; 0
TAGHEEYSAM

SEQ ID NO: 18587 - protein, 9 aa, Homo sapiens
  Table A; HLA-B*35:02; HRAS; Q61K; 0
TAGKEEYSA

SEQ ID NO: 18588 - protein, 9 aa, Homo sapiens
  Table A; HLA-B*54:01; HRAS; Q61K; 0
TAGKEEYSA

SEQ ID NO: 18589 - protein, 9 aa, Homo sapiens
  Table A; HLA-B*35:02; NRAS; Q61K; 1
TAGKEEYSA

SEQ ID NO: 18590 - protein, 9 aa, Homo sapiens
  Table A; HLA-B*35:12; NRAS; Q61K; 0
TAGKEEYSA

SEQ ID NO: 18591 - protein, 9 aa, Homo sapiens
  Table A; HLA-B*54:01; NRAS; Q61K; 0
TAGKEEYSA

SEQ ID NO: 18592 - protein, 10 aa, Homo sapiens
  Table A; HLA-B*35:01; HRAS; Q61K; 0
TAGKEEYSAM

SEQ ID NO: 18593 - protein, 10 aa, Homo sapiens
  Table A; HLA-B*35:02; HRAS; Q61K; 0
TAGKEEYSAM

SEQ ID NO: 18594 - protein, 10 aa, Homo sapiens
  Table A; HLA-B*35:03; HRAS; Q61K; 0
TAGKEEYSAM

SEQ ID NO: 18595 - protein, 10 aa, Homo sapiens
  Table A; HLA-B*35:08; HRAS; Q61K; 0
TAGKEEYSAM

SEQ ID NO: 18596 - protein, 10 aa, Homo sapiens
  Table A; HLA-B*35:12; HRAS; Q61K; 0
TAGKEEYSAM

SEQ ID NO: 18597 - protein, 10 aa, Homo sapiens
  Table A; HLA-B*35:01; NRAS; Q61K; 1
TAGKEEYSAM

SEQ ID NO: 18598 - protein, 10 aa, Homo sapiens
  Table A; HLA-B*35:02; NRAS; Q61K; 1
TAGKEEYSAM

SEQ ID NO: 18599 - protein, 10 aa, Homo sapiens
  Table A; HLA-B*35:03; NRAS; Q61K; 1
TAGKEEYSAM

SEQ ID NO: 18600 - protein, 10 aa, Homo sapiens
  Table A; HLA-B*35:08; NRAS; Q61K; 0
TAGKEEYSAM

SEQ ID NO: 18601 - protein, 10 aa, Homo sapiens
  Table A; HLA-B*35:12; NRAS; Q61K; 0
TAGKEEYSAM

SEQ ID NO: 18602 - protein, 9 aa, Homo sapiens
  Table A; HLA-B*35:02; KRAS; Q61L; 0
TAGLEEYSA

SEQ ID NO: 18603 - protein, 9 aa, Homo sapiens
  Table A; HLA-B*35:03; KRAS; Q61L; 0
TAGLEEYSA

SEQ ID NO: 18604 - protein, 9 aa, Homo sapiens
  Table A; HLA-B*35:12; KRAS; Q61L; 0
TAGLEEYSA

SEQ ID NO: 18605 - protein, 9 aa, Homo sapiens
  Table A; HLA-B*54:01; KRAS; Q61L; 0
TAGLEEYSA

SEQ ID NO: 18606 - protein, 9 aa, Homo sapiens
  Table A; HLA-B*35:02; NRAS; Q61L; 0
TAGLEEYSA

SEQ ID NO: 18607 - protein, 9 aa, Homo sapiens
  Table A; HLA-B*35:03; NRAS; Q61L; 0
TAGLEEYSA

SEQ ID NO: 18608 - protein, 9 aa, Homo sapiens
  Table A; HLA-B*35:12; NRAS; Q61L; 0
TAGLEEYSA

SEQ ID NO: 18609 - protein, 9 aa, Homo sapiens
  Table A; HLA-B*54:01; NRAS; Q61L; 0
TAGLEEYSA

SEQ ID NO: 18610 - protein, 10 aa, Homo sapiens
  Table A; HLA-B*35:01; KRAS; Q61L; 0
TAGLEEYSAM

SEQ ID NO: 18611 - protein, 10 aa, Homo sapiens
  Table A; HLA-B*35:03; KRAS; Q61L; 0
TAGLEEYSAM

SEQ ID NO: 18612 - protein, 10 aa, Homo sapiens
  Table A; HLA-B*35:08; KRAS; Q61L; 0
TAGLEEYSAM

SEQ ID NO: 18613 - protein, 10 aa, Homo sapiens
  Table A; HLA-B*35:01; NRAS; Q61L; 1
TAGLEEYSAM

SEQ ID NO: 18614 - protein, 10 aa, Homo sapiens
  Table A; HLA-B*35:03; NRAS; Q61L; 0
TAGLEEYSAM

SEQ ID NO: 18615 - protein, 10 aa, Homo sapiens
  Table A; HLA-B*35:08; NRAS; Q61L; 0
TAGLEEYSAM

SEQ ID NO: 18616 - protein, 10 aa, Homo sapiens
  Table A; HLA-B*35:12; NRAS; Q61L; 0
TAGLEEYSAM

SEQ ID NO: 18617 - protein, 9 aa, Homo sapiens
  Table A; HLA-B*54:01; KRAS; Q61R; 0
TAGREEYSA

SEQ ID NO: 18618 - protein, 9 aa, Homo sapiens
  Table A; HLA-B*54:01; NRAS; Q61R; 0
TAGREEYSA

SEQ ID NO: 18619 - protein, 10 aa, Homo sapiens
  Table A; HLA-B*35:01; KRAS; Q61R; 0
TAGREEYSAM

SEQ ID NO: 18620 - protein, 10 aa, Homo sapiens
  Table A; HLA-B*35:02; KRAS; Q61R; 0
TAGREEYSAM

SEQ ID NO: 18621 - protein, 10 aa, Homo sapiens
  Table A; HLA-B*35:03; KRAS; Q61R; 0
TAGREEYSAM

SEQ ID NO: 18622 - protein, 10 aa, Homo sapiens
  Table A; HLA-B*35:08; KRAS; Q61R; 0
TAGREEYSAM

SEQ ID NO: 18623 - protein, 10 aa, Homo sapiens
  Table A; HLA-B*35:12; KRAS; Q61R; 0
TAGREEYSAM

SEQ ID NO: 18624 - protein, 10 aa, Homo sapiens
  Table A; HLA-B*35:01; NRAS; Q61R; 1
TAGREEYSAM

SEQ ID NO: 18625 - protein, 10 aa, Homo sapiens
  Table A; HLA-B*35:02; NRAS; Q61R; 1
TAGREEYSAM

SEQ ID NO: 18626 - protein, 10 aa, Homo sapiens
  Table A; HLA-B*35:03; NRAS; Q61R; 1
TAGREEYSAM

SEQ ID NO: 18627 - protein, 10 aa, Homo sapiens
  Table A; HLA-B*35:08; NRAS; Q61R; 0
TAGREEYSAM

SEQ ID NO: 18628 - protein, 10 aa, Homo sapiens
  Table A; HLA-B*35:12; NRAS; Q61R; 0
TAGREEYSAM

SEQ ID NO: 18629 - protein, 10 aa, Homo sapiens
  Table A; HLA-A*31:01; TP53; S127F; 0
TAKSVTCTYF

SEQ ID NO: 18630 - protein, 10 aa, Homo sapiens
  Table A; HLA-B*57:01; TP53; S127F; 0
TAKSVTCTYF

SEQ ID NO: 18631 - protein, 10 aa, Homo sapiens
  Table A; HLA-C*02:02; TP53; S127F; 0
TAKSVTCTYF

SEQ ID NO: 18632 - protein, 8 aa, Homo sapiens
  Table A; HLA-A*11:01; CTNNB1; S45F; 1
TAPFLSGK

SEQ ID NO: 18633 - protein, 8 aa, Homo sapiens
  Table A; HLA-B*51:01; CTNNB1; S45F; 1
TAPFLSGK

SEQ ID NO: 18634 - protein, 8 aa, Homo sapiens
  Table A; HLA-A*03:02; CTNNB1; S45P; 0
TAPPLSGK

SEQ ID NO: 18635 - protein, 8 aa, Homo sapiens
  Table A; HLA-A*11:01; CTNNB1; S45P; 1
TAPPLSGK

SEQ ID NO: 18636 - protein, 8 aa, Homo sapiens
  Table A; HLA-A*68:01; CTNNB1; S45P; 1
TAPPLSGK

SEQ ID NO: 18637 - protein, 8 aa, Homo sapiens
  Table A; HLA-B*51:01; CTNNB1; S45P; 1
TAPPLSGK

SEQ ID NO: 18638 - protein, 9 aa, Homo sapiens
  Table A; HLA-B*57:01; PIK3CA; E545A; 0
TAQEKDFLW

SEQ ID NO: 18639 - protein, 9 aa, Homo sapiens
  Table A; HLA-B*58:01; PIK3CA; E545A; 0
TAQEKDFLW

SEQ ID NO: 18640 - protein, 9 aa, Homo sapiens
  Table A; HLA-B*35:03; FGFR2; Y375C; 0
TASPDCLEI

SEQ ID NO: 18641 - protein, 9 aa, Homo sapiens
  Table A; HLA-A*30:01; CTNNB1; T41A; 1
TATAPSLSG

SEQ ID NO: 18642 - protein, 9 aa, Homo sapiens
  Table A; HLA-A*33:03; CTNNB1; T41A; 0
TATAPSLSG

SEQ ID NO: 18643 - protein, 9 aa, Homo sapiens
  Table A; HLA-A*68:01; CTNNB1; T41A; 1
TATAPSLSG

SEQ ID NO: 18644 - protein, 9 aa, Homo sapiens
  Table A; HLA-B*07:02; CTNNB1; T41A; 1
TATAPSLSG

SEQ ID NO: 18645 - protein, 9 aa, Homo sapiens
  Table A; HLA-B*35:01; CTNNB1; T41A; 1
TATAPSLSG

SEQ ID NO: 18646 - protein, 9 aa, Homo sapiens
  Table A; HLA-B*39:01; CTNNB1; T41A; 1
TATAPSLSG

SEQ ID NO: 18647 - protein, 9 aa, Homo sapiens
  Table A; HLA-B*54:01; CTNNB1; T41A; 0
TATAPSLSG

SEQ ID NO: 18648 - protein, 9 aa, Homo sapiens
  Table A; HLA-B*55:02; CTNNB1; T41A; 0
TATAPSLSG

SEQ ID NO: 18649 - protein, 9 aa, Homo sapiens
  Table A; HLA-B*56:01; CTNNB1; T41A; 0
TATAPSLSG

SEQ ID NO: 18650 - protein, 9 aa, Homo sapiens
  Table A; HLA-B*58:01; CTNNB1; T41A; 0
TATAPSLSG

SEQ ID NO: 18651 - protein, 9 aa, Homo sapiens
  Table A; HLA-C*08:01; CTNNB1; T41A; 0
TATAPSLSG

SEQ ID NO: 18652 - protein, 10 aa, Homo sapiens
  Table A; HLA-A*03:01; CTNNB1; T41A; 1
TATAPSLSGK

SEQ ID NO: 18653 - protein, 10 aa, Homo sapiens
  Table A; HLA-A*03:02; CTNNB1; T41A; 0
TATAPSLSGK

SEQ ID NO: 18654 - protein, 10 aa, Homo sapiens
  Table A; HLA-A*11:01; CTNNB1; T41A; 1
TATAPSLSGK

SEQ ID NO: 18655 - protein, 10 aa, Homo sapiens
  Table A; HLA-A*26:03; CTNNB1; T41A; 0
TATAPSLSGK

SEQ ID NO: 18656 - protein, 10 aa, Homo sapiens
  Table A; HLA-A*33:03; CTNNB1; T41A; 0
TATAPSLSGK

SEQ ID NO: 18657 - protein, 10 aa, Homo sapiens
  Table A; HLA-A*68:01; CTNNB1; T41A; 1
TATAPSLSGK

SEQ ID NO: 18658 - protein, 10 aa, Homo sapiens
  Table A; HLA-A*68:02; CTNNB1; T41A; 0
TATAPSLSGK

SEQ ID NO: 18659 - protein, 10 aa, Homo sapiens
  Table A; HLA-B*27:02; CTNNB1; T41A; 0
TATAPSLSGK

SEQ ID NO: 18660 - protein, 11 aa, Homo sapiens
  Table A; HLA-A*68:01; CTNNB1; T41A; 1
TATAPSLSGKG

SEQ ID NO: 18661 - protein, 10 aa, Homo sapiens
  Table A; HLA-A*03:02; TP53; L130F; 0
TCTYSPAFNK

SEQ ID NO: 18662 - protein, 10 aa, Homo sapiens
  Table A; HLA-A*11:01; TP53; L130F; 0
TCTYSPAFNK

SEQ ID NO: 18663 - protein, 10 aa, Homo sapiens
  Table A; HLA-A*33:03; TP53; K132R; 0
TCTYSPALNR

SEQ ID NO: 18664 - protein, 10 aa, Homo sapiens
  Table A; HLA-A*68:01; TP53; K132R; 0
TCTYSPALNR

SEQ ID NO: 18665 - protein, 9 aa, Homo sapiens
  Table A; HLA-B*18:01; EGFR; L861Q; 0
TDFGLAKQL

SEQ ID NO: 18666 - protein, 9 aa, Homo sapiens
  Table A; HLA-B*37:01; EGFR; L861Q; 0
TDFGLAKQL

SEQ ID NO: 18667 - protein, 9 aa, Homo sapiens
  Table A; HLA-B*40:01; EGFR; L861Q; 1
TDFGLAKQL

SEQ ID NO: 18668 - protein, 9 aa, Homo sapiens
  Table A; HLA-B*40:02; EGFR; L861Q; 0
TDFGLAKQL

SEQ ID NO: 18669 - protein, 9 aa, Homo sapiens
  Table A; HLA-B*41:02; EGFR; L861Q; 0
TDFGLAKQL

SEQ ID NO: 18670 - protein, 9 aa, Homo sapiens
  Table A; HLA-B*44:02; EGFR; L861Q; 1
TDFGLAKQL

SEQ ID NO: 18671 - protein, 9 aa, Homo sapiens
  Table A; HLA-B*44:03; EGFR; L861Q; 0
TDFGLAKQL

SEQ ID NO: 18672 - protein, 9 aa, Homo sapiens
  Table A; HLA-B*44:05; EGFR; L861Q; 0
TDFGLAKQL

SEQ ID NO: 18673 - protein, 10 aa, Homo sapiens
  Table A; HLA-C*08:03; EGFR; L861Q; 0
TDFGLAKQLG

SEQ ID NO: 18674 - protein, 8 aa, Homo sapiens
  Table A; HLA-B*40:02; EGFR; L858R; 0
TDFGRAKL

SEQ ID NO: 18675 - protein, 8 aa, Homo sapiens
  Table A; HLA-B*41:02; EGFR; L858R; 0
TDFGRAKL

SEQ ID NO: 18676 - protein, 9 aa, Homo sapiens
  Table A; HLA-B*37:01; EGFR; L858R; 0
TDFGRAKLL

SEQ ID NO: 18677 - protein, 9 aa, Homo sapiens
  Table A; HLA-C*03:02; PTPRB; R529Q; 0
TDLVPGQKY

SEQ ID NO: 18678 - protein, 9 aa, Homo sapiens
  Table A; HLA-B*44:02; PIK3CA; E545D; 1
TDQEKDFLW

SEQ ID NO: 18679 - protein, 9 aa, Homo sapiens
  Table A; HLA-B*44:03; PIK3CA; E545D; 0
TDQEKDFLW

SEQ ID NO: 18680 - protein, 8 aa, Homo sapiens
  Table A; HLA-B*40:02; ERBB2; S310F; 0
TDVGFCTL

SEQ ID NO: 18681 - protein, 8 aa, Homo sapiens
  Table A; HLA-B*41:02; ERBB2; S310F; 0
TDVGFCTL

SEQ ID NO: 18682 - protein, 8 aa, Homo sapiens
  Table A; HLA-B*40:02; ERBB2; S310Y; 0
TDVGYCTL

SEQ ID NO: 18683 - protein, 9 aa, Homo sapiens
  Table A; HLA-B*15:01; ARHGAP5; V474A; 1
TEADSKEAY

SEQ ID NO: 18684 - protein, 9 aa, Homo sapiens
  Table A; HLA-B*15:02; ARHGAP5; V474A; 0
TEADSKEAY

SEQ ID NO: 18685 - protein, 9 aa, Homo sapiens
  Table A; HLA-B*18:01; ARHGAP5; V474A; 1
TEADSKEAY

SEQ ID NO: 18686 - protein, 9 aa, Homo sapiens
  Table A; HLA-B*35:01; ARHGAP5; V474A; 1
TEADSKEAY

SEQ ID NO: 18687 - protein, 9 aa, Homo sapiens
  Table A; HLA-B*41:02; ARHGAP5; V474A; 0
TEADSKEAY

SEQ ID NO: 18688 - protein, 9 aa, Homo sapiens
  Table A; HLA-B*44:02; ARHGAP5; V474A; 1
TEADSKEAY

SEQ ID NO: 18689 - protein, 9 aa, Homo sapiens
  Table A; HLA-B*44:03; ARHGAP5; V474A; 1
TEADSKEAY

SEQ ID NO: 18690 - protein, 9 aa, Homo sapiens
  Table A; HLA-B*44:05; ARHGAP5; V474A; 0
TEADSKEAY

SEQ ID NO: 18691 - protein, 9 aa, Homo sapiens
  Table A; HLA-B*58:01; ARHGAP5; V474A; 0
TEADSKEAY

SEQ ID NO: 18692 - protein, 9 aa, Homo sapiens
  Table A; HLA-C*03:02; ARHGAP5; V474A; 0
TEADSKEAY

SEQ ID NO: 18693 - protein, 9 aa, Homo sapiens
  Table A; HLA-C*08:01; ARHGAP5; V474A; 0
TEADSKEAY

SEQ ID NO: 18694 - protein, 9 aa, Homo sapiens
  Table A; HLA-C*16:04; ARHGAP5; V474A; 0
TEADSKEAY

SEQ ID NO: 18695 - protein, 10 aa, Homo sapiens
  Table A; HLA-B*49:01; TNC; L1626I; 0
TEAEPEVDNI

SEQ ID NO: 18696 - protein, 11 aa, Homo sapiens
  Table A; HLA-A*30:01; TNC; L1626I; 0
TEAEPEVDNIL

SEQ ID NO: 18697 - protein, 11 aa, Homo sapiens
  Table A; HLA-B*40:01; TNC; L1626I; 1
TEAEPEVDNIL

SEQ ID NO: 18698 - protein, 11 aa, Homo sapiens
  Table A; HLA-B*40:02; TNC; L1626I; 0
TEAEPEVDNIL

SEQ ID NO: 18699 - protein, 11 aa, Homo sapiens
  Table A; HLA-B*41:02; TNC; L1626I; 0
TEAEPEVDNIL

SEQ ID NO: 18700 - protein, 11 aa, Homo sapiens
  Table A; HLA-B*44:05; TNC; L1626I; 0
TEAEPEVDNIL

SEQ ID NO: 18701 - protein, 9 aa, Homo sapiens
  Table A; HLA-B*50:01; KNSTRN; S24F; 0
TECDFHPLP

SEQ ID NO: 18702 - protein, 8 aa, Homo sapiens
  Table A; HLA-B*08:01; PIK3CA; Q546K; 1
TEKEKDFL

SEQ ID NO: 18703 - protein, 8 aa, Homo sapiens
  Table A; HLA-B*41:02; PIK3CA; Q546K; 0
TEKEKDFL

SEQ ID NO: 18704 - protein, 9 aa, Homo sapiens
  Table A; HLA-A*23:01; PIK3CA; Q546K; 0
TEKEKDFLW

SEQ ID NO: 18705 - protein, 9 aa, Homo sapiens
  Table A; HLA-B*44:02; PIK3CA; Q546K; 1
TEKEKDFLW

SEQ ID NO: 18706 - protein, 9 aa, Homo sapiens
  Table A; HLA-B*44:03; PIK3CA; Q546K; 1
TEKEKDFLW

SEQ ID NO: 18707 - protein, 9 aa, Homo sapiens
  Table A; HLA-B*57:01; PIK3CA; Q546K; 0
TEKEKDFLW

SEQ ID NO: 18708 - protein, 8 aa, Homo sapiens
  Table A; HLA-B*18:01; CHD4; R975H; 1
TELIVHVE

SEQ ID NO: 18709 - protein, 9 aa, Homo sapiens
  Table A; HLA-A*23:01; CHD4; R975H; 0
TELIVHVEL

SEQ ID NO: 18710 - protein, 9 aa, Homo sapiens
  Table A; HLA-A*30:01; CHD4; R975H; 0
TELIVHVEL

SEQ ID NO: 18711 - protein, 9 aa, Homo sapiens
  Table A; HLA-B*07:02; CHD4; R975H; 1
TELIVHVEL

SEQ ID NO: 18712 - protein, 9 aa, Homo sapiens
  Table A; HLA-B*08:01; CHD4; R975H; 1
TELIVHVEL

SEQ ID NO: 18713 - protein, 9 aa, Homo sapiens
  Table A; HLA-B*14:02; CHD4; R975H; 0
TELIVHVEL

SEQ ID NO: 18714 - protein, 9 aa, Homo sapiens
  Table A; HLA-B*15:01; CHD4; R975H; 1
TELIVHVEL

SEQ ID NO: 18715 - protein, 9 aa, Homo sapiens
  Table A; HLA-B*18:01; CHD4; R975H; 1
TELIVHVEL

SEQ ID NO: 18716 - protein, 9 aa, Homo sapiens
  Table A; HLA-B*35:01; CHD4; R975H; 1
TELIVHVEL

SEQ ID NO: 18717 - protein, 9 aa, Homo sapiens
  Table A; HLA-B*35:03; CHD4; R975H; 0
TELIVHVEL

SEQ ID NO: 18718 - protein, 9 aa, Homo sapiens
  Table A; HLA-B*37:01; CHD4; R975H; 0
TELIVHVEL

SEQ ID NO: 18719 - protein, 9 aa, Homo sapiens
  Table A; HLA-B*38:01; CHD4; R975H; 0
TELIVHVEL

SEQ ID NO: 18720 - protein, 9 aa, Homo sapiens
  Table A; HLA-B*39:01; CHD4; R975H; 0
TELIVHVEL

SEQ ID NO: 18721 - protein, 9 aa, Homo sapiens
  Table A; HLA-B*40:01; CHD4; R975H; 1
TELIVHVEL

SEQ ID NO: 18722 - protein, 9 aa, Homo sapiens
  Table A; HLA-B*40:02; CHD4; R975H; 0
TELIVHVEL

SEQ ID NO: 18723 - protein, 9 aa, Homo sapiens
  Table A; HLA-B*41:02; CHD4; R975H; 0
TELIVHVEL

SEQ ID NO: 18724 - protein, 9 aa, Homo sapiens
  Table A; HLA-B*44:02; CHD4; R975H; 1
TELIVHVEL

SEQ ID NO: 18725 - protein, 9 aa, Homo sapiens
  Table A; HLA-B*44:03; CHD4; R975H; 1
TELIVHVEL

SEQ ID NO: 18726 - protein, 9 aa, Homo sapiens
  Table A; HLA-B*44:05; CHD4; R975H; 0
TELIVHVEL

SEQ ID NO: 18727 - protein, 9 aa, Homo sapiens
  Table A; HLA-B*48:01; CHD4; R975H; 0
TELIVHVEL

SEQ ID NO: 18728 - protein, 9 aa, Homo sapiens
  Table A; HLA-B*49:01; CHD4; R975H; 0
TELIVHVEL

SEQ ID NO: 18729 - protein, 9 aa, Homo sapiens
  Table A; HLA-B*58:01; CHD4; R975H; 0
TELIVHVEL

SEQ ID NO: 18730 - protein, 9 aa, Homo sapiens
  Table A; HLA-C*03:02; CHD4; R975H; 0
TELIVHVEL

SEQ ID NO: 18731 - protein, 9 aa, Homo sapiens
  Table A; HLA-C*08:01; CHD4; R975H; 0
TELIVHVEL

SEQ ID NO: 18732 - protein, 9 aa, Homo sapiens
  Table A; HLA-C*16:04; CHD4; R975H; 0
TELIVHVEL

SEQ ID NO: 18733 - protein, 9 aa, Homo sapiens
  Table A; HLA-A*03:02; CTNND1; A781T; 0
TENLEAAKK

SEQ ID NO: 18734 - protein, 9 aa, Homo sapiens
  Table A; HLA-B*44:05; CTNND1; A781T; 0
TENLEAAKK

SEQ ID NO: 18735 - protein, 10 aa, Homo sapiens
  Table A; HLA-A*30:01; CTNND1; A781T; 0
TENLEAAKKL

SEQ ID NO: 18736 - protein, 10 aa, Homo sapiens
  Table A; HLA-B*40:01; CTNND1; A781T; 0
TENLEAAKKL

SEQ ID NO: 18737 - protein, 10 aa, Homo sapiens
  Table A; HLA-B*40:02; CTNND1; A781T; 0
TENLEAAKKL

SEQ ID NO: 18738 - protein, 10 aa, Homo sapiens
  Table A; HLA-B*41:02; CTNND1; A781T; 0
TENLEAAKKL

SEQ ID NO: 18739 - protein, 10 aa, Homo sapiens
  Table A; HLA-B*44:02; CTNND1; A781T; 0
TENLEAAKKL

SEQ ID NO: 18740 - protein, 10 aa, Homo sapiens
  Table A; HLA-B*44:03; CTNND1; A781T; 0
TENLEAAKKL

SEQ ID NO: 18741 - protein, 10 aa, Homo sapiens
  Table A; HLA-B*44:05; CTNND1; A781T; 0
TENLEAAKKL

SEQ ID NO: 18742 - protein, 9 aa, Homo sapiens
  Table A; HLA-A*23:01; PIK3CA; Q546P; 0
TEPEKDFLW

SEQ ID NO: 18743 - protein, 9 aa, Homo sapiens
  Table A; HLA-B*44:02; PIK3CA; Q546P; 1
TEPEKDFLW

SEQ ID NO: 18744 - protein, 9 aa, Homo sapiens
  Table A; HLA-B*44:03; PIK3CA; Q546P; 1
TEPEKDFLW

SEQ ID NO: 18745 - protein, 9 aa, Homo sapiens
  Table A; HLA-B*44:05; PIK3CA; Q546P; 0
TEPEKDFLW

SEQ ID NO: 18746 - protein, 9 aa, Homo sapiens
  Table A; HLA-B*57:01; PIK3CA; Q546P; 1
TEPEKDFLW

SEQ ID NO: 18747 - protein, 8 aa, Homo sapiens
  Table A; HLA-B*41:02; PIK3CA; Q546R; 0
TEREKDFL

SEQ ID NO: 18748 - protein, 9 aa, Homo sapiens
  Table A; HLA-A*23:01; PIK3CA; Q546R; 0
TEREKDFLW

SEQ ID NO: 18749 - protein, 9 aa, Homo sapiens
  Table A; HLA-B*44:02; PIK3CA; Q546R; 1
TEREKDFLW

SEQ ID NO: 18750 - protein, 9 aa, Homo sapiens
  Table A; HLA-B*44:03; PIK3CA; Q546R; 1
TEREKDFLW

SEQ ID NO: 18751 - protein, 9 aa, Homo sapiens
  Table A; HLA-B*57:01; PIK3CA; Q546R; 1
TEREKDFLW

SEQ ID NO: 18752 - protein, 11 aa, Homo sapiens
  Table A; HLA-B*39:06; KRAS; G12A; 0
TEYKLVVVGAA

SEQ ID NO: 18753 - protein, 11 aa, Homo sapiens
  Table A; HLA-B*40:02; KRAS; G12A; 0
TEYKLVVVGAA

SEQ ID NO: 18754 - protein, 11 aa, Homo sapiens
  Table A; HLA-B*40:06; KRAS; G12A; 0
TEYKLVVVGAA

SEQ ID NO: 18755 - protein, 11 aa, Homo sapiens
  Table A; HLA-B*50:01; KRAS; G12A; 0
TEYKLVVVGAA

SEQ ID NO: 18756 - protein, 11 aa, Homo sapiens
  Table A; HLA-B*40:02; KRAS; G12V; 1
TEYKLVVVGAV

SEQ ID NO: 18757 - protein, 11 aa, Homo sapiens
  Table A; HLA-B*49:01; KRAS; G12V; 1
TEYKLVVVGAV

SEQ ID NO: 18758 - protein, 10 aa, Homo sapiens
  Table A; HLA-A*29:02; TP53; R213Q; 0
TFQHSVVVPY

SEQ ID NO: 18759 - protein, 10 aa, Homo sapiens
  Table A; HLA-B*27:02; TP53; R213Q; 0
TFQHSVVVPY

SEQ ID NO: 18760 - protein, 10 aa, Homo sapiens
  Table A; HLA-C*14:02; TP53; R213Q; 0
TFQHSVVVPY

SEQ ID NO: 18761 - protein, 10 aa, Homo sapiens
  Table A; HLA-A*68:01; PTPRB; R529Q; 0
TFTDLVPGQK

SEQ ID NO: 18762 - protein, 11 aa, Homo sapiens
  Table A; HLA-A*29:01; PTPRB; R529Q; 0
TFTDLVPGQKY

SEQ ID NO: 18763 - protein, 11 aa, Homo sapiens
  Table A; HLA-A*29:02; PTPRB; R529Q; 0
TFTDLVPGQKY

SEQ ID NO: 18764 - protein, 10 aa, Homo sapiens
  Table A; HLA-B*54:01; NFE2L2; E82D; 0
TGDFLPIQPA

SEQ ID NO: 18765 - protein, 8 aa, Homo sapiens
  Table A; HLA-C*05:01; ARHGEF12; R113Q; 1
TGDQIIKV

SEQ ID NO: 18766 - protein, 9 aa, Homo sapiens
  Table A; HLA-B*57:01; PIK3CA; E545G; 0
TGQEKDFLW

SEQ ID NO: 18767 - protein, 8 aa, Homo sapiens
  Table A; HLA-A*03:01; A1CF; E34K; 1
TGYSLVQK

SEQ ID NO: 18768 - protein, 8 aa, Homo sapiens
  Table A; HLA-A*03:02; A1CF; E34K; 0
TGYSLVQK

SEQ ID NO: 18769 - protein, 8 aa, Homo sapiens
  Table A; HLA-A*11:01; A1CF; E34K; 1
TGYSLVQK

SEQ ID NO: 18770 - protein, 8 aa, Homo sapiens
  Table A; HLA-A*68:01; A1CF; E34K; 0
TGYSLVQK

SEQ ID NO: 18771 - protein, 8 aa, Homo sapiens
  Table A; HLA-B*27:05; A1CF; E34K; 1
TGYSLVQK

SEQ ID NO: 18772 - protein, 8 aa, Homo sapiens
  Table A; HLA-B*51:01; A1CF; E34K; 1
TGYSLVQK

SEQ ID NO: 18773 - protein, 9 aa, Homo sapiens
  Table A; HLA-B*27:05; A1CF; E34K; 1
TGYSLVQKN

SEQ ID NO: 18774 - protein, 9 aa, Homo sapiens
  Table A; HLA-C*08:03; A1CF; E34K; 0
TGYSLVQKN

SEQ ID NO: 18775 - protein, 10 aa, Homo sapiens
  Table A; HLA-A*68:02; TP53; G262V; 0
TIITLEDSSV

SEQ ID NO: 18776 - protein, 9 aa, Homo sapiens
  Table A; HLA-A*31:01; CTNND1; A781T; 0
TINEVITEN

SEQ ID NO: 18777 - protein, 9 aa, Homo sapiens
  Table A; HLA-A*33:03; CTNND1; A781T; 0
TINEVITEN

SEQ ID NO: 18778 - protein, 9 aa, Homo sapiens
  Table A; HLA-A*68:01; CTNND1; A781T; 0
TINEVITEN

SEQ ID NO: 18779 - protein, 9 aa, Homo sapiens
  Table A; HLA-A*68:02; CTNND1; A781T; 0
TINEVITEN

SEQ ID NO: 18780 - protein, 10 aa, Homo sapiens
  Table A; HLA-A*02:04; CTNND1; A781T; 0
TINEVITENL

SEQ ID NO: 18781 - protein, 10 aa, Homo sapiens
  Table A; HLA-A*02:05; CTNND1; A781T; 0
TINEVITENL

SEQ ID NO: 18782 - protein, 10 aa, Homo sapiens
  Table A; HLA-A*02:07; CTNND1; A781T; 0
TINEVITENL

SEQ ID NO: 18783 - protein, 10 aa, Homo sapiens
  Table A; HLA-A*02:08; CTNND1; A781T; 0
TINEVITENL

SEQ ID NO: 18784 - protein, 10 aa, Homo sapiens
  Table A; HLA-A*03:01; CTNND1; A781T; 1
TINEVITENL

SEQ ID NO: 18785 - protein, 10 aa, Homo sapiens
  Table A; HLA-A*03:02; CTNND1; A781T; 0
TINEVITENL

SEQ ID NO: 18786 - protein, 10 aa, Homo sapiens
  Table A; HLA-A*11:01; CTNND1; A781T; 0
TINEVITENL

SEQ ID NO: 18787 - protein, 10 aa, Homo sapiens
  Table A; HLA-A*68:01; CTNND1; A781T; 0
TINEVITENL

SEQ ID NO: 18788 - protein, 10 aa, Homo sapiens
  Table A; HLA-A*68:02; CTNND1; A781T; 0
TINEVITENL

SEQ ID NO: 18789 - protein, 10 aa, Homo sapiens
  Table A; HLA-B*38:01; CTNND1; A781T; 0
TINEVITENL

SEQ ID NO: 18790 - protein, 10 aa, Homo sapiens
  Table A; HLA-B*50:01; CTNND1; A781T; 0
TINEVITENL

SEQ ID NO: 18791 - protein, 9 aa, Homo sapiens
  Table A; HLA-B*13:02; CTNNB1; T41I; 0
TITAPSLSG

SEQ ID NO: 18792 - protein, 9 aa, Homo sapiens
  Table A; HLA-B*54:01; CTNNB1; T41I; 0
TITAPSLSG

SEQ ID NO: 18793 - protein, 10 aa, Homo sapiens
  Table A; HLA-A*03:01; CTNNB1; T41I; 1
TITAPSLSGK

SEQ ID NO: 18794 - protein, 10 aa, Homo sapiens
  Table A; HLA-A*03:02; CTNNB1; T41I; 0
TITAPSLSGK

SEQ ID NO: 18795 - protein, 10 aa, Homo sapiens
  Table A; HLA-A*11:01; CTNNB1; T41I; 1
TITAPSLSGK

SEQ ID NO: 18796 - protein, 10 aa, Homo sapiens
  Table A; HLA-A*26:03; CTNNB1; T41I; 0
TITAPSLSGK

SEQ ID NO: 18797 - protein, 10 aa, Homo sapiens
  Table A; HLA-A*33:03; CTNNB1; T41I; 0
TITAPSLSGK

SEQ ID NO: 18798 - protein, 10 aa, Homo sapiens
  Table A; HLA-A*68:01; CTNNB1; T41I; 0
TITAPSLSGK

SEQ ID NO: 18799 - protein, 10 aa, Homo sapiens
  Table A; HLA-A*68:02; CTNNB1; T41I; 0
TITAPSLSGK

SEQ ID NO: 18800 - protein, 10 aa, Homo sapiens
  Table A; HLA-B*27:02; CTNNB1; T41I; 0
TITAPSLSGK

SEQ ID NO: 18801 - protein, 10 aa, Homo sapiens
  Table A; HLA-B*15:03; SPOP; R121Q; 0
TKAMESQQAY

SEQ ID NO: 18802 - protein, 10 aa, Homo sapiens
  Table A; HLA-B*15:03; SPOP; M117V; 0
TKAVESQRAY

SEQ ID NO: 18803 - protein, 9 aa, Homo sapiens
  Table A; HLA-A*02:01; ARHGEF12; R705H; 1
TLDGTPHTL

SEQ ID NO: 18804 - protein, 9 aa, Homo sapiens
  Table A; HLA-A*02:03; ARHGEF12; R705H; 0
TLDGTPHTL

SEQ ID NO: 18805 - protein, 9 aa, Homo sapiens
  Table A; HLA-A*02:04; ARHGEF12; R705H; 0
TLDGTPHTL

SEQ ID NO: 18806 - protein, 9 aa, Homo sapiens
  Table A; HLA-A*02:05; ARHGEF12; R705H; 0
TLDGTPHTL

SEQ ID NO: 18807 - protein, 9 aa, Homo sapiens
  Table A; HLA-A*02:06; ARHGEF12; R705H; 0
TLDGTPHTL

SEQ ID NO: 18808 - protein, 9 aa, Homo sapiens
  Table A; HLA-A*02:07; ARHGEF12; R705H; 0
TLDGTPHTL

SEQ ID NO: 18809 - protein, 9 aa, Homo sapiens
  Table A; HLA-B*13:01; ARHGEF12; R705H; 0
TLDGTPHTL

SEQ ID NO: 18810 - protein, 9 aa, Homo sapiens
  Table A; HLA-B*13:02; ARHGEF12; R705H; 0
TLDGTPHTL

SEQ ID NO: 18811 - protein, 9 aa, Homo sapiens
  Table A; HLA-B*15:02; ARHGEF12; R705H; 0
TLDGTPHTL

SEQ ID NO: 18812 - protein, 9 aa, Homo sapiens
  Table A; HLA-B*15:10; ARHGEF12; R705H; 0
TLDGTPHTL

SEQ ID NO: 18813 - protein, 9 aa, Homo sapiens
  Table A; HLA-B*15:13; ARHGEF12; R705H; 0
TLDGTPHTL

SEQ ID NO: 18814 - protein, 9 aa, Homo sapiens
  Table A; HLA-B*35:02; ARHGEF12; R705H; 0
TLDGTPHTL

SEQ ID NO: 18815 - protein, 9 aa, Homo sapiens
  Table A; HLA-B*35:03; ARHGEF12; R705H; 0
TLDGTPHTL

SEQ ID NO: 18816 - protein, 9 aa, Homo sapiens
  Table A; HLA-B*35:12; ARHGEF12; R705H; 0
TLDGTPHTL

SEQ ID NO: 18817 - protein, 9 aa, Homo sapiens
  Table A; HLA-B*38:01; ARHGEF12; R705H; 0
TLDGTPHTL

SEQ ID NO: 18818 - protein, 9 aa, Homo sapiens
  Table A; HLA-B*39:01; ARHGEF12; R705H; 0
TLDGTPHTL

SEQ ID NO: 18819 - protein, 9 aa, Homo sapiens
  Table A; HLA-B*40:01; ARHGEF12; R705H; 1
TLDGTPHTL

SEQ ID NO: 18820 - protein, 9 aa, Homo sapiens
  Table A; HLA-B*48:01; ARHGEF12; R705H; 0
TLDGTPHTL

SEQ ID NO: 18821 - protein, 9 aa, Homo sapiens
  Table A; HLA-C*03:04; ARHGEF12; R705H; 1
TLDGTPHTL

SEQ ID NO: 18822 - protein, 9 aa, Homo sapiens
  Table A; HLA-C*04:01; ARHGEF12; R705H; 1
TLDGTPHTL

SEQ ID NO: 18823 - protein, 9 aa, Homo sapiens
  Table A; HLA-C*05:01; ARHGEF12; R705H; 1
TLDGTPHTL

SEQ ID NO: 18824 - protein, 9 aa, Homo sapiens
  Table A; HLA-C*08:01; ARHGEF12; R705H; 0
TLDGTPHTL

SEQ ID NO: 18825 - protein, 9 aa, Homo sapiens
  Table A; HLA-C*08:02; ARHGEF12; R705H; 0
TLDGTPHTL

SEQ ID NO: 18826 - protein, 9 aa, Homo sapiens
  Table A; HLA-C*17:01; ARHGEF12; R705H; 0
TLDGTPHTL

SEQ ID NO: 18827 - protein, 11 aa, Homo sapiens
  Table A; HLA-A*68:01; TP53; G266R; 0
TLEDSSGNLLR

SEQ ID NO: 18828 - protein, 11 aa, Homo sapiens
  Table A; HLA-B*27:02; TP53; G266R; 0
TLEDSSGNLLR

SEQ ID NO: 18829 - protein, 11 aa, Homo sapiens
  Table A; HLA-C*08:03; TP53; G266R; 0
TLEDSSGNLLR

SEQ ID NO: 18830 - protein, 11 aa, Homo sapiens
  Table A; HLA-A*02:01; TP53; G266V; 1
TLEDSSGNLLV

SEQ ID NO: 18831 - protein, 11 aa, Homo sapiens
  Table A; HLA-A*02:04; TP53; G266V; 0
TLEDSSGNLLV

SEQ ID NO: 18832 - protein, 11 aa, Homo sapiens
  Table A; HLA-B*13:02; TP53; G266V; 0
TLEDSSGNLLV

SEQ ID NO: 18833 - protein, 11 aa, Homo sapiens
  Table A; HLA-C*08:03; TP53; G266V; 0
TLEDSSGNLLV

SEQ ID NO: 18834 - protein, 9 aa, Homo sapiens
  Table A; HLA-A*02:01; TP53; G262V; 1
TLEDSSVNL

SEQ ID NO: 18835 - protein, 9 aa, Homo sapiens
  Table A; HLA-A*02:04; TP53; G262V; 0
TLEDSSVNL

SEQ ID NO: 18836 - protein, 9 aa, Homo sapiens
  Table A; HLA-A*02:05; TP53; G262V; 0
TLEDSSVNL

SEQ ID NO: 18837 - protein, 9 aa, Homo sapiens
  Table A; HLA-A*02:06; TP53; G262V; 0
TLEDSSVNL

SEQ ID NO: 18838 - protein, 9 aa, Homo sapiens
  Table A; HLA-A*02:07; TP53; G262V; 0
TLEDSSVNL

SEQ ID NO: 18839 - protein, 9 aa, Homo sapiens
  Table A; HLA-B*13:01; TP53; G262V; 0
TLEDSSVNL

SEQ ID NO: 18840 - protein, 9 aa, Homo sapiens
  Table A; HLA-B*35:02; TP53; G262V; 0
TLEDSSVNL

SEQ ID NO: 18841 - protein, 9 aa, Homo sapiens
  Table A; HLA-B*35:03; TP53; G262V; 0
TLEDSSVNL

SEQ ID NO: 18842 - protein, 9 aa, Homo sapiens
  Table A; HLA-B*35:12; TP53; G262V; 0
TLEDSSVNL

SEQ ID NO: 18843 - protein, 9 aa, Homo sapiens
  Table A; HLA-B*38:01; TP53; G262V; 0
TLEDSSVNL

SEQ ID NO: 18844 - protein, 9 aa, Homo sapiens
  Table A; HLA-B*39:01; TP53; G262V; 0
TLEDSSVNL

SEQ ID NO: 18845 - protein, 9 aa, Homo sapiens
  Table A; HLA-B*40:01; TP53; G262V; 0
TLEDSSVNL

SEQ ID NO: 18846 - protein, 9 aa, Homo sapiens
  Table A; HLA-C*05:01; TP53; G262V; 1
TLEDSSVNL

SEQ ID NO: 18847 - protein, 9 aa, Homo sapiens
  Table A; HLA-C*08:02; TP53; G262V; 0
TLEDSSVNL

SEQ ID NO: 18848 - protein, 10 aa, Homo sapiens
  Table A; HLA-A*02:05; TP53; G262V; 0
TLEDSSVNLL

SEQ ID NO: 18849 - protein, 10 aa, Homo sapiens
  Table A; HLA-B*38:01; TP53; G262V; 0
TLEDSSVNLL

SEQ ID NO: 18850 - protein, 10 aa, Homo sapiens
  Table A; HLA-B*39:01; TP53; G262V; 0
TLEDSSVNLL

SEQ ID NO: 18851 - protein, 10 aa, Homo sapiens
  Table A; HLA-C*08:03; TP53; G262V; 0
TLEDSSVNLL

SEQ ID NO: 18852 - protein, 9 aa, Homo sapiens
  Table A; HLA-B*15:01; MTOR; S2215Y; 1
TLLANDPTY

SEQ ID NO: 18853 - protein, 9 aa, Homo sapiens
  Table A; HLA-B*15:02; MTOR; S2215Y; 0
TLLANDPTY

SEQ ID NO: 18854 - protein, 9 aa, Homo sapiens
  Table A; HLA-B*15:13; MTOR; S2215Y; 0
TLLANDPTY

SEQ ID NO: 18855 - protein, 9 aa, Homo sapiens
  Table A; HLA-B*27:05; MTOR; S2215Y; 1
TLLANDPTY

SEQ ID NO: 18856 - protein, 9 aa, Homo sapiens
  Table A; HLA-B*35:01; MTOR; S2215Y; 1
TLLANDPTY

SEQ ID NO: 18857 - protein, 9 aa, Homo sapiens
  Table A; HLA-B*35:08; MTOR; S2215Y; 0
TLLANDPTY

SEQ ID NO: 18858 - protein, 9 aa, Homo sapiens
  Table A; HLA-C*08:01; MTOR; S2215Y; 0
TLLANDPTY

SEQ ID NO: 18859 - protein, 10 aa, Homo sapiens
  Table A; HLA-A*02:01; MTOR; S2215Y; 1
TLLANDPTYL

SEQ ID NO: 18860 - protein, 10 aa, Homo sapiens
  Table A; HLA-A*02:03; MTOR; S2215Y; 0
TLLANDPTYL

SEQ ID NO: 18861 - protein, 10 aa, Homo sapiens
  Table A; HLA-A*02:04; MTOR; S2215Y; 0
TLLANDPTYL

SEQ ID NO: 18862 - protein, 10 aa, Homo sapiens
  Table A; HLA-C*17:01; MTOR; S2215Y; 0
TLLANDPTYL

SEQ ID NO: 18863 - protein, 8 aa, Homo sapiens
  Table A; HLA-A*02:04; STAG1; A116T; 0
TLLDLINF

SEQ ID NO: 18864 - protein, 9 aa, Homo sapiens
  Table A; HLA-A*02:04; STAG1; A116T; 0
TLLDLINFF

SEQ ID NO: 18865 - protein, 9 aa, Homo sapiens
  Table A; HLA-A*23:01; STAG1; A116T; 0
TLLDLINFF

SEQ ID NO: 18866 - protein, 10 aa, Homo sapiens
  Table A; HLA-A*02:01; STAG1; A116T; 1
TLLDLINFFI

SEQ ID NO: 18867 - protein, 10 aa, Homo sapiens
  Table A; HLA-A*02:04; STAG1; A116T; 0
TLLDLINFFI

SEQ ID NO: 18868 - protein, 9 aa, Homo sapiens
  Table A; HLA-A*02:07; ERBB3; V104M; 0
TLPLPNLRM

SEQ ID NO: 18869 - protein, 9 aa, Homo sapiens
  Table A; HLA-B*41:02; TP53; R337L; 0
TLQIRGREL

SEQ ID NO: 18870 - protein, 8 aa, Homo sapiens
  Table A; HLA-A*02:03; CTNNB1; N387K; 0
TLRKLSDA

SEQ ID NO: 18871 - protein, 9 aa, Homo sapiens
  Table A; HLA-A*02:03; CTNNB1; N387K; 0
TLRKLSDAA

SEQ ID NO: 18872 - protein, 9 aa, Homo sapiens
  Table A; HLA-B*39:06; CTNNB1; N387K; 0
TLRKLSDAA

SEQ ID NO: 18873 - protein, 9 aa, Homo sapiens
  Table A; HLA-B*54:01; CTNNB1; N387K; 0
TLRKLSDAA

SEQ ID NO: 18874 - protein, 11 aa, Homo sapiens
  Table A; HLA-A*03:01; CTNNB1; N387K; 1
TLRKLSDAATK

SEQ ID NO: 18875 - protein, 11 aa, Homo sapiens
  Table A; HLA-A*03:02; CTNNB1; N387K; 0
TLRKLSDAATK

SEQ ID NO: 18876 - protein, 10 aa, Homo sapiens
  Table A; HLA-B*15:02; PPP2R1A; S256F; 0
TLRQAAEDKF

SEQ ID NO: 18877 - protein, 9 aa, Homo sapiens
  Table A; HLA-B*54:01; CDKN2A; H83Y; 0
TLTRPVYDA

SEQ ID NO: 18878 - protein, 9 aa, Homo sapiens
  Table A; HLA-B*55:02; CDKN2A; H83Y; 0
TLTRPVYDA

SEQ ID NO: 18879 - protein, 10 aa, Homo sapiens
  Table A; HLA-C*08:03; CDKN2A; H83Y; 0
TLTRPVYDAA

SEQ ID NO: 18880 - protein, 9 aa, Homo sapiens
  Table A; HLA-A*02:03; FBXW7; G423V; 0
TLVGHTGVV

SEQ ID NO: 18881 - protein, 10 aa, Homo sapiens
  Table A; HLA-B*15:02; FBXW7; G423V; 0
TLVGHTGVVW

SEQ ID NO: 18882 - protein, 10 aa, Homo sapiens
  Table A; HLA-B*15:13; FBXW7; G423V; 0
TLVGHTGVVW

SEQ ID NO: 18883 - protein, 10 aa, Homo sapiens
  Table A; HLA-C*08:01; FBXW7; G423V; 0
TLVGHTGVVW

SEQ ID NO: 18884 - protein, 10 aa, Homo sapiens
  Table A; HLA-B*15:02; FBXW7; R465C; 0
TLYGHTSTVC

SEQ ID NO: 18885 - protein, 10 aa, Homo sapiens
  Table A; HLA-B*15:02; FBXW7; R465H; 0
TLYGHTSTVH

SEQ ID NO: 18886 - protein, 10 aa, Homo sapiens
  Table A; HLA-C*08:01; FBXW7; R465H; 0
TLYGHTSTVH

SEQ ID NO: 18887 - protein, 8 aa, Homo sapiens
  Table A; HLA-A*26:01; RAC1; P29L; 0
TNAFLGEY

SEQ ID NO: 18888 - protein, 8 aa, Homo sapiens
  Table A; HLA-B*15:01; RAC1; P29L; 1
TNAFLGEY

SEQ ID NO: 18889 - protein, 8 aa, Homo sapiens
  Table A; HLA-B*35:01; RAC1; P29L; 1
TNAFLGEY

SEQ ID NO: 18890 - protein, 8 aa, Homo sapiens
  Table A; HLA-B*39:01; RAC1; P29L; 0
TNAFLGEY

SEQ ID NO: 18891 - protein, 9 aa, Homo sapiens
  Table A; HLA-A*68:02; RAC1; P29L; 0
TNAFLGEYI

SEQ ID NO: 18892 - protein, 8 aa, Homo sapiens
  Table A; HLA-A*26:01; RAC1; P29S; 1
TNAFSGEY

SEQ ID NO: 18893 - protein, 8 aa, Homo sapiens
  Table A; HLA-B*15:01; RAC1; P29S; 1
TNAFSGEY

SEQ ID NO: 18894 - protein, 8 aa, Homo sapiens
  Table A; HLA-B*15:02; RAC1; P29S; 0
TNAFSGEY

SEQ ID NO: 18895 - protein, 8 aa, Homo sapiens
  Table A; HLA-B*35:01; RAC1; P29S; 1
TNAFSGEY

SEQ ID NO: 18896 - protein, 8 aa, Homo sapiens
  Table A; HLA-B*39:01; RAC1; P29S; 0
TNAFSGEY

SEQ ID NO: 18897 - protein, 9 aa, Homo sapiens
  Table A; HLA-B*38:01; RAC1; P29S; 1
TNAFSGEYI

SEQ ID NO: 18898 - protein, 9 aa, Homo sapiens
  Table A; HLA-A*29:01; CHST11; A159T; 0
TNLKTLNQY

SEQ ID NO: 18899 - protein, 9 aa, Homo sapiens
  Table A; HLA-A*29:02; CHST11; A159T; 0
TNLKTLNQY

SEQ ID NO: 18900 - protein, 9 aa, Homo sapiens
  Table A; HLA-B*15:02; CHST11; A159T; 0
TNLKTLNQY

SEQ ID NO: 18901 - protein, 9 aa, Homo sapiens
  Table A; HLA-B*35:01; CHST11; A159T; 1
TNLKTLNQY

SEQ ID NO: 18902 - protein, 8 aa, Homo sapiens
  Table A; HLA-B*39:06; ARHGEF12; R705H; 0
TPHTLNTV

SEQ ID NO: 18903 - protein, 8 aa, Homo sapiens
  Table A; HLA-B*51:01; ARHGEF12; R705H; 1
TPHTLNTV

SEQ ID NO: 18904 - protein, 8 aa, Homo sapiens
  Table A; HLA-B*54:01; ARHGEF12; R705H; 0
TPHTLNTV

SEQ ID NO: 18905 - protein, 8 aa, Homo sapiens
  Table A; HLA-B*55:01; ARHGEF12; R705H; 0
TPHTLNTV

SEQ ID NO: 18906 - protein, 8 aa, Homo sapiens
  Table A; HLA-B*55:02; ARHGEF12; R705H; 0
TPHTLNTV

SEQ ID NO: 18907 - protein, 8 aa, Homo sapiens
  Table A; HLA-B*56:01; ARHGEF12; R705H; 0
TPHTLNTV

SEQ ID NO: 18908 - protein, 9 aa, Homo sapiens
  Table A; HLA-B*07:02; ARHGEF12; R705H; 1
TPHTLNTVF

SEQ ID NO: 18909 - protein, 9 aa, Homo sapiens
  Table A; HLA-B*15:02; ARHGEF12; R705H; 0
TPHTLNTVF

SEQ ID NO: 18910 - protein, 9 aa, Homo sapiens
  Table A; HLA-B*35:01; ARHGEF12; R705H; 1
TPHTLNTVF

SEQ ID NO: 18911 - protein, 9 aa, Homo sapiens
  Table A; HLA-B*35:03; ARHGEF12; R705H; 0
TPHTLNTVF

SEQ ID NO: 18912 - protein, 9 aa, Homo sapiens
  Table A; HLA-B*35:08; ARHGEF12; R705H; 0
TPHTLNTVF

SEQ ID NO: 18913 - protein, 8 aa, Homo sapiens
  Table A; HLA-B*54:01; CAMTA1; A1117V; 0
TPLMWVCA

SEQ ID NO: 18914 - protein, 10 aa, Homo sapiens
  Table A; HLA-B*07:02; SMARCA4; E920K; 1
TPLQNKLPKL

SEQ ID NO: 18915 - protein, 8 aa, Homo sapiens
  Table A; HLA-B*39:06; PPP2R1A; R183W; 0
TPMVRWAA

SEQ ID NO: 18916 - protein, 8 aa, Homo sapiens
  Table A; HLA-B*54:01; PPP2R1A; R183W; 0
TPMVRWAA

SEQ ID NO: 18917 - protein, 8 aa, Homo sapiens
  Table A; HLA-B*55:01; PPP2R1A; R183W; 0
TPMVRWAA

SEQ ID NO: 18918 - protein, 8 aa, Homo sapiens
  Table A; HLA-B*55:02; PPP2R1A; R183W; 0
TPMVRWAA

SEQ ID NO: 18919 - protein, 8 aa, Homo sapiens
  Table A; HLA-B*56:01; PPP2R1A; R183W; 0
TPMVRWAA

SEQ ID NO: 18920 - protein, 9 aa, Homo sapiens
  Table A; HLA-B*07:02; PPP2R1A; R183W; 1
TPMVRWAAA

SEQ ID NO: 18921 - protein, 9 aa, Homo sapiens
  Table A; HLA-B*08:01; PPP2R1A; R183W; 1
TPMVRWAAA

SEQ ID NO: 18922 - protein, 9 aa, Homo sapiens
  Table A; HLA-B*39:06; PPP2R1A; R183W; 0
TPMVRWAAA

SEQ ID NO: 18923 - protein, 9 aa, Homo sapiens
  Table A; HLA-B*54:01; PPP2R1A; R183W; 0
TPMVRWAAA

SEQ ID NO: 18924 - protein, 9 aa, Homo sapiens
  Table A; HLA-B*55:01; PPP2R1A; R183W; 0
TPMVRWAAA

SEQ ID NO: 18925 - protein, 9 aa, Homo sapiens
  Table A; HLA-B*55:02; PPP2R1A; R183W; 0
TPMVRWAAA

SEQ ID NO: 18926 - protein, 9 aa, Homo sapiens
  Table A; HLA-B*56:01; PPP2R1A; R183W; 0
TPMVRWAAA

SEQ ID NO: 18927 - protein, 8 aa, Homo sapiens
  Table A; HLA-B*07:02; TP53; V157F; 1
TPPPGTRF

SEQ ID NO: 18928 - protein, 8 aa, Homo sapiens
  Table A; HLA-B*35:01; TP53; V157F; 1
TPPPGTRF

SEQ ID NO: 18929 - protein, 8 aa, Homo sapiens
  Table A; HLA-B*35:08; TP53; V157F; 0
TPPPGTRF

SEQ ID NO: 18930 - protein, 8 aa, Homo sapiens
  Table A; HLA-B*51:01; TP53; V157F; 0
TPPPGTRF

SEQ ID NO: 18931 - protein, 9 aa, Homo sapiens
  Table A; HLA-B*35:01; TP53; R158H; 0
TPPPGTRVH

SEQ ID NO: 18932 - protein, 10 aa, Homo sapiens
  Table A; HLA-B*54:01; TP53; R158H; 0
TPPPGTRVHA

SEQ ID NO: 18933 - protein, 10 aa, Homo sapiens
  Table A; HLA-B*55:01; TP53; R158H; 0
TPPPGTRVHA

SEQ ID NO: 18934 - protein, 10 aa, Homo sapiens
  Table A; HLA-B*55:02; TP53; R158H; 0
TPPPGTRVHA

SEQ ID NO: 18935 - protein, 10 aa, Homo sapiens
  Table A; HLA-B*56:01; TP53; R158H; 0
TPPPGTRVHA

SEQ ID NO: 18936 - protein, 11 aa, Homo sapiens
  Table A; HLA-B*07:02; TP53; R158H; 1
TPPPGTRVHAM

SEQ ID NO: 18937 - protein, 11 aa, Homo sapiens
  Table A; HLA-B*08:01; TP53; R158H; 1
TPPPGTRVHAM

SEQ ID NO: 18938 - protein, 11 aa, Homo sapiens
  Table A; HLA-B*35:01; TP53; R158H; 0
TPPPGTRVHAM

SEQ ID NO: 18939 - protein, 11 aa, Homo sapiens
  Table A; HLA-B*35:03; TP53; R158H; 0
TPPPGTRVHAM

SEQ ID NO: 18940 - protein, 10 aa, Homo sapiens
  Table A; HLA-A*68:02; TP53; A159V; 0
TPPPGTRVRV

SEQ ID NO: 18941 - protein, 9 aa, Homo sapiens
  Table A; HLA-B*13:02; PTK6; H126P; 0
TQAVRPYKI

SEQ ID NO: 18942 - protein, 9 aa, Homo sapiens
  Table A; HLA-B*13:01; PIK3CA; E81K; 0
TQEAEREKF

SEQ ID NO: 18943 - protein, 9 aa, Homo sapiens
  Table A; HLA-B*38:01; PIK3CA; E81K; 0
TQEAEREKF

SEQ ID NO: 18944 - protein, 9 aa, Homo sapiens
  Table A; HLA-B*15:01; MECOM; R205S; 1
TQFSNLCSH

SEQ ID NO: 18945 - protein, 8 aa, Homo sapiens
  Table A; HLA-A*32:01; PIK3CB; R321Q; 0
TQIISHVW

SEQ ID NO: 18946 - protein, 8 aa, Homo sapiens
  Table A; HLA-B*15:13; PIK3CB; R321Q; 0
TQIISHVW

SEQ ID NO: 18947 - protein, 9 aa, Homo sapiens
  Table A; HLA-A*32:01; PTPRT; M903I; 0
TQIKRGQGY

SEQ ID NO: 18948 - protein, 9 aa, Homo sapiens
  Table A; HLA-B*15:01; PTPRT; M903I; 1
TQIKRGQGY

SEQ ID NO: 18949 - protein, 9 aa, Homo sapiens
  Table A; HLA-B*15:02; PTPRT; M903I; 0
TQIKRGQGY

SEQ ID NO: 18950 - protein, 9 aa, Homo sapiens
  Table A; HLA-B*15:03; PTPRT; M903I; 0
TQIKRGQGY

SEQ ID NO: 18951 - protein, 9 aa, Homo sapiens
  Table A; HLA-A*02:05; ZFHX3; R846C; 0
TQIQHNCHL

SEQ ID NO: 18952 - protein, 9 aa, Homo sapiens
  Table A; HLA-B*15:10; ZFHX3; R846C; 0
TQIQHNCHL

SEQ ID NO: 18953 - protein, 9 aa, Homo sapiens
  Table A; HLA-A*02:03; MAP2K1; K57N; 0
TQNQKVGEL

SEQ ID NO: 18954 - protein, 9 aa, Homo sapiens
  Table A; HLA-A*02:05; MAP2K1; K57N; 0
TQNQKVGEL

SEQ ID NO: 18955 - protein, 9 aa, Homo sapiens
  Table A; HLA-A*02:06; MAP2K1; K57N; 0
TQNQKVGEL

SEQ ID NO: 18956 - protein, 9 aa, Homo sapiens
  Table A; HLA-A*02:08; MAP2K1; K57N; 0
TQNQKVGEL

SEQ ID NO: 18957 - protein, 9 aa, Homo sapiens
  Table A; HLA-A*30:01; MAP2K1; K57N; 0
TQNQKVGEL

SEQ ID NO: 18958 - protein, 9 aa, Homo sapiens
  Table A; HLA-B*07:02; MAP2K1; K57N; 1
TQNQKVGEL

SEQ ID NO: 18959 - protein, 9 aa, Homo sapiens
  Table A; HLA-B*08:01; MAP2K1; K57N; 0
TQNQKVGEL

SEQ ID NO: 18960 - protein, 9 aa, Homo sapiens
  Table A; HLA-B*13:01; MAP2K1; K57N; 0
TQNQKVGEL

SEQ ID NO: 18961 - protein, 9 aa, Homo sapiens
  Table A; HLA-B*13:02; MAP2K1; K57N; 0
TQNQKVGEL

SEQ ID NO: 18962 - protein, 9 aa, Homo sapiens
  Table A; HLA-B*14:02; MAP2K1; K57N; 0
TQNQKVGEL

SEQ ID NO: 18963 - protein, 9 aa, Homo sapiens
  Table A; HLA-B*15:01; MAP2K1; K57N; 0
TQNQKVGEL

SEQ ID NO: 18964 - protein, 9 aa, Homo sapiens
  Table A; HLA-B*15:02; MAP2K1; K57N; 0
TQNQKVGEL

SEQ ID NO: 18965 - protein, 9 aa, Homo sapiens
  Table A; HLA-B*15:10; MAP2K1; K57N; 0
TQNQKVGEL

SEQ ID NO: 18966 - protein, 9 aa, Homo sapiens
  Table A; HLA-B*38:01; MAP2K1; K57N; 0
TQNQKVGEL

SEQ ID NO: 18967 - protein, 9 aa, Homo sapiens
  Table A; HLA-B*39:01; MAP2K1; K57N; 0
TQNQKVGEL

SEQ ID NO: 18968 - protein, 9 aa, Homo sapiens
  Table A; HLA-B*40:02; MAP2K1; K57N; 0
TQNQKVGEL

SEQ ID NO: 18969 - protein, 9 aa, Homo sapiens
  Table A; HLA-B*41:02; MAP2K1; K57N; 0
TQNQKVGEL

SEQ ID NO: 18970 - protein, 9 aa, Homo sapiens
  Table A; HLA-B*44:05; MAP2K1; K57N; 0
TQNQKVGEL

SEQ ID NO: 18971 - protein, 9 aa, Homo sapiens
  Table A; HLA-B*46:01; MAP2K1; K57N; 0
TQNQKVGEL

SEQ ID NO: 18972 - protein, 9 aa, Homo sapiens
  Table A; HLA-B*48:01; MAP2K1; K57N; 0
TQNQKVGEL

SEQ ID NO: 18973 - protein, 9 aa, Homo sapiens
  Table A; HLA-C*01:02; MAP2K1; K57N; 0
TQNQKVGEL

SEQ ID NO: 18974 - protein, 9 aa, Homo sapiens
  Table A; HLA-C*08:01; MAP2K1; K57N; 0
TQNQKVGEL

SEQ ID NO: 18975 - protein, 9 aa, Homo sapiens
  Table A; HLA-C*08:03; MAP2K1; K57N; 0
TQNQKVGEL

SEQ ID NO: 18976 - protein, 10 aa, Homo sapiens
  Table A; HLA-A*03:01; MAP2K1; K57N; 1
TQNQKVGELK

SEQ ID NO: 18977 - protein, 10 aa, Homo sapiens
  Table A; HLA-A*03:02; MAP2K1; K57N; 0
TQNQKVGELK

SEQ ID NO: 18978 - protein, 10 aa, Homo sapiens
  Table A; HLA-A*11:01; MAP2K1; K57N; 0
TQNQKVGELK

SEQ ID NO: 18979 - protein, 10 aa, Homo sapiens
  Table A; HLA-B*27:02; MAP2K1; K57N; 0
TQNQKVGELK

SEQ ID NO: 18980 - protein, 8 aa, Homo sapiens
  Table A; HLA-B*15:01; PCBP1; L100Q; 1
TQRLVVPA

SEQ ID NO: 18981 - protein, 8 aa, Homo sapiens
  Table A; HLA-B*15:02; PCBP1; L100Q; 0
TQRLVVPA

SEQ ID NO: 18982 - protein, 8 aa, Homo sapiens
  Table A; HLA-B*39:06; PCBP1; L100Q; 0
TQRLVVPA

SEQ ID NO: 18983 - protein, 9 aa, Homo sapiens
  Table A; HLA-A*30:01; PCBP1; L100Q; 0
TQRLVVPAT

SEQ ID NO: 18984 - protein, 9 aa, Homo sapiens
  Table A; HLA-B*13:02; PCBP1; L100Q; 0
TQRLVVPAT

SEQ ID NO: 18985 - protein, 9 aa, Homo sapiens
  Table A; HLA-B*39:06; PCBP1; L100Q; 0
TQRLVVPAT

SEQ ID NO: 18986 - protein, 8 aa, Homo sapiens
  Table A; HLA-B*14:01; SMARCA4; G1162S; 0
TRAGGLSL

SEQ ID NO: 18987 - protein, 8 aa, Homo sapiens
  Table A; HLA-B*14:02; SMARCA4; G1162S; 0
TRAGGLSL

SEQ ID NO: 18988 - protein, 8 aa, Homo sapiens
  Table A; HLA-B*15:10; SMARCA4; G1162S; 0
TRAGGLSL

SEQ ID NO: 18989 - protein, 8 aa, Homo sapiens
  Table A; HLA-B*38:01; SMARCA4; G1162S; 0
TRAGGLSL

SEQ ID NO: 18990 - protein, 8 aa, Homo sapiens
  Table A; HLA-B*39:01; SMARCA4; G1162S; 0
TRAGGLSL

SEQ ID NO: 18991 - protein, 10 aa, Homo sapiens
  Table A; HLA-B*27:02; SMARCA4; G1162S; 0
TRAGGLSLNL

SEQ ID NO: 18992 - protein, 10 aa, Homo sapiens
  Table A; HLA-B*27:05; SMARCA4; G1162S; 0
TRAGGLSLNL

SEQ ID NO: 18993 - protein, 10 aa, Homo sapiens
  Table A; HLA-B*38:01; SMARCA4; G1162S; 0
TRAGGLSLNL

SEQ ID NO: 18994 - protein, 10 aa, Homo sapiens
  Table A; HLA-B*39:01; SMARCA4; G1162S; 0
TRAGGLSLNL

SEQ ID NO: 18995 - protein, 10 aa, Homo sapiens
  Table A; HLA-B*39:06; PIK3CA; E545A; 0
TRDPLSEITA

SEQ ID NO: 18996 - protein, 11 aa, Homo sapiens
  Table A; HLA-B*27:02; PIK3CA; Q546K; 0
TRDPLSEITEK

SEQ ID NO: 18997 - protein, 11 aa, Homo sapiens
  Table A; HLA-B*27:05; PIK3CA; Q546K; 0
TRDPLSEITEK

SEQ ID NO: 18998 - protein, 11 aa, Homo sapiens
  Table A; HLA-B*27:02; PIK3CA; Q546R; 0
TRDPLSEITER

SEQ ID NO: 18999 - protein, 10 aa, Homo sapiens
  Table A; HLA-B*39:01; PIK3CA; E545G; 0
TRDPLSEITG

SEQ ID NO: 19000 - protein, 10 aa, Homo sapiens
  Table A; HLA-B*27:02; PIK3CA; E545K; 0
TRDPLSEITK

SEQ ID NO: 19001 - protein, 10 aa, Homo sapiens
  Table A; HLA-B*27:05; PIK3CA; E545K; 1
TRDPLSEITK

SEQ ID NO: 19002 - protein, 9 aa, Homo sapiens
  Table A; HLA-B*14:02; PPP2R1A; P179R; 1
TRMVRRAAA

SEQ ID NO: 19003 - protein, 8 aa, Homo sapiens
  Table A; HLA-B*39:06; CDKN2A; H83Y; 0
TRPVYDAA

SEQ ID NO: 19004 - protein, 8 aa, Homo sapiens
  Table A; HLA-B*27:05; TP53; I195T; 1
TRVEGNLR

SEQ ID NO: 19005 - protein, 9 aa, Homo sapiens
  Table A; HLA-B*13:02; TP53; I195T; 0
TRVEGNLRV

SEQ ID NO: 19006 - protein, 9 aa, Homo sapiens
  Table A; HLA-B*15:10; TP53; I195T; 0
TRVEGNLRV

SEQ ID NO: 19007 - protein, 9 aa, Homo sapiens
  Table A; HLA-B*27:05; TP53; I195T; 1
TRVEGNLRV

SEQ ID NO: 19008 - protein, 9 aa, Homo sapiens
  Table A; HLA-B*38:01; TP53; I195T; 0
TRVEGNLRV

SEQ ID NO: 19009 - protein, 9 aa, Homo sapiens
  Table A; HLA-B*39:01; TP53; I195T; 0
TRVEGNLRV

SEQ ID NO: 19010 - protein, 9 aa, Homo sapiens
  Table A; HLA-B*39:06; TP53; I195T; 0
TRVEGNLRV

SEQ ID NO: 19011 - protein, 9 aa, Homo sapiens
  Table A; HLA-C*06:02; TP53; I195T; 1
TRVEGNLRV

SEQ ID NO: 19012 - protein, 11 aa, Homo sapiens
  Table A; HLA-B*27:02; TP53; I195T; 0
TRVEGNLRVEY

SEQ ID NO: 19013 - protein, 11 aa, Homo sapiens
  Table A; HLA-B*27:05; TP53; I195T; 1
TRVEGNLRVEY

SEQ ID NO: 19014 - protein, 11 aa, Homo sapiens
  Table A; HLA-C*16:04; TP53; I195T; 0
TRVEGNLRVEY

SEQ ID NO: 19015 - protein, 9 aa, Homo sapiens
  Table A; HLA-B*27:02; TP53; R158H; 0
TRVHAMAIY

SEQ ID NO: 19016 - protein, 9 aa, Homo sapiens
  Table A; HLA-A*31:01; GRIN2A; R1067W; 0
TSNWATCHR

SEQ ID NO: 19017 - protein, 9 aa, Homo sapiens
  Table A; HLA-A*33:03; GRIN2A; R1067W; 0
TSNWATCHR

SEQ ID NO: 19018 - protein, 8 aa, Homo sapiens
  Table A; HLA-B*51:01; TP53; P151S; 0
TSPPGTRV

SEQ ID NO: 19019 - protein, 8 aa, Homo sapiens
  Table A; HLA-C*01:02; TP53; P151S; 0
TSPPGTRV

SEQ ID NO: 19020 - protein, 9 aa, Homo sapiens
  Table A; HLA-A*26:03; TP53; P151S; 0
TSPPGTRVR

SEQ ID NO: 19021 - protein, 9 aa, Homo sapiens
  Table A; HLA-A*31:01; TP53; P151S; 0
TSPPGTRVR

SEQ ID NO: 19022 - protein, 9 aa, Homo sapiens
  Table A; HLA-A*33:03; TP53; P151S; 0
TSPPGTRVR

SEQ ID NO: 19023 - protein, 9 aa, Homo sapiens
  Table A; HLA-A*68:01; TP53; P151S; 0
TSPPGTRVR

SEQ ID NO: 19024 - protein, 9 aa, Homo sapiens
  Table A; HLA-C*15:02; STAG2; R370Q; 0
TSQFKDRIV

SEQ ID NO: 19025 - protein, 9 aa, Homo sapiens
  Table A; HLA-C*16:01; STAG2; R370Q; 0
TSQFKDRIV

SEQ ID NO: 19026 - protein, 11 aa, Homo sapiens
  Table A; HLA-B*08:01; STAG2; R370Q; 0
TSQFKDRIVSM

SEQ ID NO: 19027 - protein, 10 aa, Homo sapiens
  Table A; HLA-A*02:01; NT5C2; R8Q; 1
TSWSDQLQNA

SEQ ID NO: 19028 - protein, 10 aa, Homo sapiens
  Table A; HLA-C*08:03; NT5C2; R8Q; 0
TSWSDQLQNA

SEQ ID NO: 19029 - protein, 9 aa, Homo sapiens
  Table A; HLA-A*02:03; CTNNB1; S45F; 0
TTAPFLSGK

SEQ ID NO: 19030 - protein, 9 aa, Homo sapiens
  Table A; HLA-A*03:01; CTNNB1; S45F; 1
TTAPFLSGK

SEQ ID NO: 19031 - protein, 9 aa, Homo sapiens
  Table A; HLA-A*03:02; CTNNB1; S45F; 0
TTAPFLSGK

SEQ ID NO: 19032 - protein, 9 aa, Homo sapiens
  Table A; HLA-A*11:01; CTNNB1; S45F; 1
TTAPFLSGK

SEQ ID NO: 19033 - protein, 9 aa, Homo sapiens
  Table A; HLA-A*26:01; CTNNB1; S45F; 0
TTAPFLSGK

SEQ ID NO: 19034 - protein, 9 aa, Homo sapiens
  Table A; HLA-A*26:03; CTNNB1; S45F; 0
TTAPFLSGK

SEQ ID NO: 19035 - protein, 9 aa, Homo sapiens
  Table A; HLA-A*30:01; CTNNB1; S45F; 0
TTAPFLSGK

SEQ ID NO: 19036 - protein, 9 aa, Homo sapiens
  Table A; HLA-A*31:01; CTNNB1; S45F; 0
TTAPFLSGK

SEQ ID NO: 19037 - protein, 9 aa, Homo sapiens
  Table A; HLA-A*33:01; CTNNB1; S45F; 0
TTAPFLSGK

SEQ ID NO: 19038 - protein, 9 aa, Homo sapiens
  Table A; HLA-A*33:03; CTNNB1; S45F; 0
TTAPFLSGK

SEQ ID NO: 19039 - protein, 9 aa, Homo sapiens
  Table A; HLA-A*68:01; CTNNB1; S45F; 0
TTAPFLSGK

SEQ ID NO: 19040 - protein, 9 aa, Homo sapiens
  Table A; HLA-A*68:02; CTNNB1; S45F; 0
TTAPFLSGK

SEQ ID NO: 19041 - protein, 9 aa, Homo sapiens
  Table A; HLA-B*27:02; CTNNB1; S45F; 0
TTAPFLSGK

SEQ ID NO: 19042 - protein, 9 aa, Homo sapiens
  Table A; HLA-B*27:05; CTNNB1; S45F; 0
TTAPFLSGK

SEQ ID NO: 19043 - protein, 9 aa, Homo sapiens
  Table A; HLA-B*35:01; CTNNB1; S45F; 1
TTAPFLSGK

SEQ ID NO: 19044 - protein, 9 aa, Homo sapiens
  Table A; HLA-B*57:01; CTNNB1; S45F; 1
TTAPFLSGK

SEQ ID NO: 19045 - protein, 9 aa, Homo sapiens
  Table A; HLA-B*58:01; CTNNB1; S45F; 0
TTAPFLSGK

SEQ ID NO: 19046 - protein, 10 aa, Homo sapiens
  Table A; HLA-A*02:03; CTNNB1; S45F; 0
TTAPFLSGKG

SEQ ID NO: 19047 - protein, 10 aa, Homo sapiens
  Table A; HLA-A*02:05; CTNNB1; S45F; 0
TTAPFLSGKG

SEQ ID NO: 19048 - protein, 10 aa, Homo sapiens
  Table A; HLA-A*03:01; CTNNB1; S45F; 1
TTAPFLSGKG

SEQ ID NO: 19049 - protein, 10 aa, Homo sapiens
  Table A; HLA-A*11:01; CTNNB1; S45F; 1
TTAPFLSGKG

SEQ ID NO: 19050 - protein, 10 aa, Homo sapiens
  Table A; HLA-A*26:01; CTNNB1; S45F; 0
TTAPFLSGKG

SEQ ID NO: 19051 - protein, 10 aa, Homo sapiens
  Table A; HLA-A*29:02; CTNNB1; S45F; 0
TTAPFLSGKG

SEQ ID NO: 19052 - protein, 10 aa, Homo sapiens
  Table A; HLA-A*33:03; CTNNB1; S45F; 0
TTAPFLSGKG

SEQ ID NO: 19053 - protein, 10 aa, Homo sapiens
  Table A; HLA-A*68:01; CTNNB1; S45F; 0
TTAPFLSGKG

SEQ ID NO: 19054 - protein, 10 aa, Homo sapiens
  Table A; HLA-A*68:02; CTNNB1; S45F; 0
TTAPFLSGKG

SEQ ID NO: 19055 - protein, 8 aa, Homo sapiens
  Table A; HLA-B*48:01; CTNNB1; S45P; 0
TTAPPLSG

SEQ ID NO: 19056 - protein, 9 aa, Homo sapiens
  Table A; HLA-A*02:01; CTNNB1; S45P; 1
TTAPPLSGK

SEQ ID NO: 19057 - protein, 9 aa, Homo sapiens
  Table A; HLA-A*02:03; CTNNB1; S45P; 0
TTAPPLSGK

SEQ ID NO: 19058 - protein, 9 aa, Homo sapiens
  Table A; HLA-A*02:05; CTNNB1; S45P; 0
TTAPPLSGK

SEQ ID NO: 19059 - protein, 9 aa, Homo sapiens
  Table A; HLA-A*02:06; CTNNB1; S45P; 0
TTAPPLSGK

SEQ ID NO: 19060 - protein, 9 aa, Homo sapiens
  Table A; HLA-A*02:08; CTNNB1; S45P; 0
TTAPPLSGK

SEQ ID NO: 19061 - protein, 9 aa, Homo sapiens
  Table A; HLA-A*03:01; CTNNB1; S45P; 1
TTAPPLSGK

SEQ ID NO: 19062 - protein, 9 aa, Homo sapiens
  Table A; HLA-A*03:02; CTNNB1; S45P; 0
TTAPPLSGK

SEQ ID NO: 19063 - protein, 9 aa, Homo sapiens
  Table A; HLA-A*11:01; CTNNB1; S45P; 1
TTAPPLSGK

SEQ ID NO: 19064 - protein, 9 aa, Homo sapiens
  Table A; HLA-A*25:01; CTNNB1; S45P; 1
TTAPPLSGK

SEQ ID NO: 19065 - protein, 9 aa, Homo sapiens
  Table A; HLA-A*26:01; CTNNB1; S45P; 1
TTAPPLSGK

SEQ ID NO: 19066 - protein, 9 aa, Homo sapiens
  Table A; HLA-A*26:03; CTNNB1; S45P; 0
TTAPPLSGK

SEQ ID NO: 19067 - protein, 9 aa, Homo sapiens
  Table A; HLA-A*30:01; CTNNB1; S45P; 1
TTAPPLSGK

SEQ ID NO: 19068 - protein, 9 aa, Homo sapiens
  Table A; HLA-A*31:01; CTNNB1; S45P; 1
TTAPPLSGK

SEQ ID NO: 19069 - protein, 9 aa, Homo sapiens
  Table A; HLA-A*33:01; CTNNB1; S45P; 0
TTAPPLSGK

SEQ ID NO: 19070 - protein, 9 aa, Homo sapiens
  Table A; HLA-A*33:03; CTNNB1; S45P; 0
TTAPPLSGK

SEQ ID NO: 19071 - protein, 9 aa, Homo sapiens
  Table A; HLA-A*68:01; CTNNB1; S45P; 1
TTAPPLSGK

SEQ ID NO: 19072 - protein, 9 aa, Homo sapiens
  Table A; HLA-A*68:02; CTNNB1; S45P; 0
TTAPPLSGK

SEQ ID NO: 19073 - protein, 9 aa, Homo sapiens
  Table A; HLA-B*07:02; CTNNB1; S45P; 1
TTAPPLSGK

SEQ ID NO: 19074 - protein, 9 aa, Homo sapiens
  Table A; HLA-B*13:02; CTNNB1; S45P; 1
TTAPPLSGK

SEQ ID NO: 19075 - protein, 9 aa, Homo sapiens
  Table A; HLA-B*15:01; CTNNB1; S45P; 1
TTAPPLSGK

SEQ ID NO: 19076 - protein, 9 aa, Homo sapiens
  Table A; HLA-B*15:02; CTNNB1; S45P; 0
TTAPPLSGK

SEQ ID NO: 19077 - protein, 9 aa, Homo sapiens
  Table A; HLA-B*27:02; CTNNB1; S45P; 0
TTAPPLSGK

SEQ ID NO: 19078 - protein, 9 aa, Homo sapiens
  Table A; HLA-B*27:05; CTNNB1; S45P; 1
TTAPPLSGK

SEQ ID NO: 19079 - protein, 9 aa, Homo sapiens
  Table A; HLA-B*35:01; CTNNB1; S45P; 1
TTAPPLSGK

SEQ ID NO: 19080 - protein, 9 aa, Homo sapiens
  Table A; HLA-B*46:01; CTNNB1; S45P; 0
TTAPPLSGK

SEQ ID NO: 19081 - protein, 9 aa, Homo sapiens
  Table A; HLA-B*54:01; CTNNB1; S45P; 0
TTAPPLSGK

SEQ ID NO: 19082 - protein, 9 aa, Homo sapiens
  Table A; HLA-B*57:01; CTNNB1; S45P; 1
TTAPPLSGK

SEQ ID NO: 19083 - protein, 9 aa, Homo sapiens
  Table A; HLA-B*58:01; CTNNB1; S45P; 0
TTAPPLSGK

SEQ ID NO: 19084 - protein, 9 aa, Homo sapiens
  Table A; HLA-C*03:02; CTNNB1; S45P; 0
TTAPPLSGK

SEQ ID NO: 19085 - protein, 9 aa, Homo sapiens
  Table A; HLA-C*08:01; CTNNB1; S45P; 0
TTAPPLSGK

SEQ ID NO: 19086 - protein, 10 aa, Homo sapiens
  Table A; HLA-A*02:05; CTNNB1; S45P; 0
TTAPPLSGKG

SEQ ID NO: 19087 - protein, 10 aa, Homo sapiens
  Table A; HLA-A*03:01; CTNNB1; S45P; 1
TTAPPLSGKG

SEQ ID NO: 19088 - protein, 10 aa, Homo sapiens
  Table A; HLA-A*11:01; CTNNB1; S45P; 1
TTAPPLSGKG

SEQ ID NO: 19089 - protein, 10 aa, Homo sapiens
  Table A; HLA-A*26:01; CTNNB1; S45P; 1
TTAPPLSGKG

SEQ ID NO: 19090 - protein, 10 aa, Homo sapiens
  Table A; HLA-A*29:02; CTNNB1; S45P; 1
TTAPPLSGKG

SEQ ID NO: 19091 - protein, 10 aa, Homo sapiens
  Table A; HLA-A*33:03; CTNNB1; S45P; 0
TTAPPLSGKG

SEQ ID NO: 19092 - protein, 10 aa, Homo sapiens
  Table A; HLA-A*68:01; CTNNB1; S45P; 1
TTAPPLSGKG

SEQ ID NO: 19093 - protein, 10 aa, Homo sapiens
  Table A; HLA-A*68:02; CTNNB1; S45P; 0
TTAPPLSGKG

SEQ ID NO: 19094 - protein, 10 aa, Homo sapiens
  Table A; HLA-B*48:01; CTNNB1; S45P; 0
TTAPPLSGKG

SEQ ID NO: 19095 - protein, 11 aa, Homo sapiens
  Table A; HLA-A*68:01; CTNNB1; S45P; 1
TTAPPLSGKGN

SEQ ID NO: 19096 - protein, 9 aa, Homo sapiens
  Table A; HLA-A*68:02; TP53; M237I; 0
TTIHYNYIC

SEQ ID NO: 19097 - protein, 9 aa, Homo sapiens
  Table A; HLA-A*68:02; TP53; C238F; 0
TTIHYNYMF

SEQ ID NO: 19098 - protein, 9 aa, Homo sapiens
  Table A; HLA-B*57:01; TP53; C238F; 0
TTIHYNYMF

SEQ ID NO: 19099 - protein, 9 aa, Homo sapiens
  Table A; HLA-A*29:01; TP53; C238Y; 0
TTIHYNYMY

SEQ ID NO: 19100 - protein, 9 aa, Homo sapiens
  Table A; HLA-A*29:02; TP53; C238Y; 0
TTIHYNYMY

SEQ ID NO: 19101 - protein, 9 aa, Homo sapiens
  Table A; HLA-B*57:01; TP53; C238Y; 0
TTIHYNYMY

SEQ ID NO: 19102 - protein, 9 aa, Homo sapiens
  Table A; HLA-A*31:01; POLE; P286R; 1
TTKLPLKFR

SEQ ID NO: 19103 - protein, 9 aa, Homo sapiens
  Table A; HLA-A*33:01; POLE; P286R; 0
TTKLPLKFR

SEQ ID NO: 19104 - protein, 9 aa, Homo sapiens
  Table A; HLA-A*33:03; POLE; P286R; 0
TTKLPLKFR

SEQ ID NO: 19105 - protein, 9 aa, Homo sapiens
  Table A; HLA-A*01:01; RAC1; P29L; 1
TTNAFLGEY

SEQ ID NO: 19106 - protein, 9 aa, Homo sapiens
  Table A; HLA-A*03:01; RAC1; P29L; 1
TTNAFLGEY

SEQ ID NO: 19107 - protein, 9 aa, Homo sapiens
  Table A; HLA-A*03:02; RAC1; P29L; 0
TTNAFLGEY

SEQ ID NO: 19108 - protein, 9 aa, Homo sapiens
  Table A; HLA-A*11:01; RAC1; P29L; 1
TTNAFLGEY

SEQ ID NO: 19109 - protein, 9 aa, Homo sapiens
  Table A; HLA-A*25:01; RAC1; P29L; 0
TTNAFLGEY

SEQ ID NO: 19110 - protein, 9 aa, Homo sapiens
  Table A; HLA-A*26:01; RAC1; P29L; 0
TTNAFLGEY

SEQ ID NO: 19111 - protein, 9 aa, Homo sapiens
  Table A; HLA-A*26:02; RAC1; P29L; 0
TTNAFLGEY

SEQ ID NO: 19112 - protein, 9 aa, Homo sapiens
  Table A; HLA-A*26:03; RAC1; P29L; 0
TTNAFLGEY

SEQ ID NO: 19113 - protein, 9 aa, Homo sapiens
  Table A; HLA-A*29:01; RAC1; P29L; 0
TTNAFLGEY

SEQ ID NO: 19114 - protein, 9 aa, Homo sapiens
  Table A; HLA-A*29:02; RAC1; P29L; 0
TTNAFLGEY

SEQ ID NO: 19115 - protein, 9 aa, Homo sapiens
  Table A; HLA-A*30:02; RAC1; P29L; 0
TTNAFLGEY

SEQ ID NO: 19116 - protein, 9 aa, Homo sapiens
  Table A; HLA-A*30:04; RAC1; P29L; 0
TTNAFLGEY

SEQ ID NO: 19117 - protein, 9 aa, Homo sapiens
  Table A; HLA-A*31:01; RAC1; P29L; 0
TTNAFLGEY

SEQ ID NO: 19118 - protein, 9 aa, Homo sapiens
  Table A; HLA-A*33:01; RAC1; P29L; 0
TTNAFLGEY

SEQ ID NO: 19119 - protein, 9 aa, Homo sapiens
  Table A; HLA-A*33:03; RAC1; P29L; 0
TTNAFLGEY

SEQ ID NO: 19120 - protein, 9 aa, Homo sapiens
  Table A; HLA-A*68:01; RAC1; P29L; 0
TTNAFLGEY

SEQ ID NO: 19121 - protein, 9 aa, Homo sapiens
  Table A; HLA-A*68:02; RAC1; P29L; 0
TTNAFLGEY

SEQ ID NO: 19122 - protein, 9 aa, Homo sapiens
  Table A; HLA-B*15:01; RAC1; P29L; 1
TTNAFLGEY

SEQ ID NO: 19123 - protein, 9 aa, Homo sapiens
  Table A; HLA-B*15:02; RAC1; P29L; 0
TTNAFLGEY

SEQ ID NO: 19124 - protein, 9 aa, Homo sapiens
  Table A; HLA-B*15:03; RAC1; P29L; 0
TTNAFLGEY

SEQ ID NO: 19125 - protein, 9 aa, Homo sapiens
  Table A; HLA-B*27:02; RAC1; P29L; 0
TTNAFLGEY

SEQ ID NO: 19126 - protein, 9 aa, Homo sapiens
  Table A; HLA-B*35:01; RAC1; P29L; 1
TTNAFLGEY

SEQ ID NO: 19127 - protein, 9 aa, Homo sapiens
  Table A; HLA-B*35:08; RAC1; P29L; 0
TTNAFLGEY

SEQ ID NO: 19128 - protein, 9 aa, Homo sapiens
  Table A; HLA-B*39:01; RAC1; P29L; 0
TTNAFLGEY

SEQ ID NO: 19129 - protein, 9 aa, Homo sapiens
  Table A; HLA-B*46:01; RAC1; P29L; 0
TTNAFLGEY

SEQ ID NO: 19130 - protein, 9 aa, Homo sapiens
  Table A; HLA-B*57:01; RAC1; P29L; 0
TTNAFLGEY

SEQ ID NO: 19131 - protein, 9 aa, Homo sapiens
  Table A; HLA-B*58:01; RAC1; P29L; 0
TTNAFLGEY

SEQ ID NO: 19132 - protein, 9 aa, Homo sapiens
  Table A; HLA-C*02:02; RAC1; P29L; 0
TTNAFLGEY

SEQ ID NO: 19133 - protein, 9 aa, Homo sapiens
  Table A; HLA-C*03:02; RAC1; P29L; 0
TTNAFLGEY

SEQ ID NO: 19134 - protein, 9 aa, Homo sapiens
  Table A; HLA-C*08:01; RAC1; P29L; 0
TTNAFLGEY

SEQ ID NO: 19135 - protein, 9 aa, Homo sapiens
  Table A; HLA-C*16:01; RAC1; P29L; 0
TTNAFLGEY

SEQ ID NO: 19136 - protein, 9 aa, Homo sapiens
  Table A; HLA-C*16:04; RAC1; P29L; 0
TTNAFLGEY

SEQ ID NO: 19137 - protein, 10 aa, Homo sapiens
  Table A; HLA-A*68:02; RAC1; P29L; 0
TTNAFLGEYI

SEQ ID NO: 19138 - protein, 9 aa, Homo sapiens
  Table A; HLA-A*01:01; RAC1; P29S; 1
TTNAFSGEY

SEQ ID NO: 19139 - protein, 9 aa, Homo sapiens
  Table A; HLA-A*03:01; RAC1; P29S; 1
TTNAFSGEY

SEQ ID NO: 19140 - protein, 9 aa, Homo sapiens
  Table A; HLA-A*03:02; RAC1; P29S; 0
TTNAFSGEY

SEQ ID NO: 19141 - protein, 9 aa, Homo sapiens
  Table A; HLA-A*11:01; RAC1; P29S; 1
TTNAFSGEY

SEQ ID NO: 19142 - protein, 9 aa, Homo sapiens
  Table A; HLA-A*25:01; RAC1; P29S; 1
TTNAFSGEY

SEQ ID NO: 19143 - protein, 9 aa, Homo sapiens
  Table A; HLA-A*26:01; RAC1; P29S; 1
TTNAFSGEY

SEQ ID NO: 19144 - protein, 9 aa, Homo sapiens
  Table A; HLA-A*26:02; RAC1; P29S; 0
TTNAFSGEY

SEQ ID NO: 19145 - protein, 9 aa, Homo sapiens
  Table A; HLA-A*26:03; RAC1; P29S; 0
TTNAFSGEY

SEQ ID NO: 19146 - protein, 9 aa, Homo sapiens
  Table A; HLA-A*29:01; RAC1; P29S; 0
TTNAFSGEY

SEQ ID NO: 19147 - protein, 9 aa, Homo sapiens
  Table A; HLA-A*29:02; RAC1; P29S; 1
TTNAFSGEY

SEQ ID NO: 19148 - protein, 9 aa, Homo sapiens
  Table A; HLA-A*30:02; RAC1; P29S; 0
TTNAFSGEY

SEQ ID NO: 19149 - protein, 9 aa, Homo sapiens
  Table A; HLA-A*30:04; RAC1; P29S; 0
TTNAFSGEY

SEQ ID NO: 19150 - protein, 9 aa, Homo sapiens
  Table A; HLA-A*31:01; RAC1; P29S; 1
TTNAFSGEY

SEQ ID NO: 19151 - protein, 9 aa, Homo sapiens
  Table A; HLA-A*32:01; RAC1; P29S; 1
TTNAFSGEY

SEQ ID NO: 19152 - protein, 9 aa, Homo sapiens
  Table A; HLA-A*33:03; RAC1; P29S; 0
TTNAFSGEY

SEQ ID NO: 19153 - protein, 9 aa, Homo sapiens
  Table A; HLA-A*68:01; RAC1; P29S; 1
TTNAFSGEY

SEQ ID NO: 19154 - protein, 9 aa, Homo sapiens
  Table A; HLA-B*15:01; RAC1; P29S; 1
TTNAFSGEY

SEQ ID NO: 19155 - protein, 9 aa, Homo sapiens
  Table A; HLA-B*15:02; RAC1; P29S; 0
TTNAFSGEY

SEQ ID NO: 19156 - protein, 9 aa, Homo sapiens
  Table A; HLA-B*15:03; RAC1; P29S; 0
TTNAFSGEY

SEQ ID NO: 19157 - protein, 9 aa, Homo sapiens
  Table A; HLA-B*15:13; RAC1; P29S; 0
TTNAFSGEY

SEQ ID NO: 19158 - protein, 9 aa, Homo sapiens
  Table A; HLA-B*18:01; RAC1; P29S; 1
TTNAFSGEY

SEQ ID NO: 19159 - protein, 9 aa, Homo sapiens
  Table A; HLA-B*27:02; RAC1; P29S; 0
TTNAFSGEY

SEQ ID NO: 19160 - protein, 9 aa, Homo sapiens
  Table A; HLA-B*35:01; RAC1; P29S; 1
TTNAFSGEY

SEQ ID NO: 19161 - protein, 9 aa, Homo sapiens
  Table A; HLA-B*35:08; RAC1; P29S; 0
TTNAFSGEY

SEQ ID NO: 19162 - protein, 9 aa, Homo sapiens
  Table A; HLA-B*39:01; RAC1; P29S; 0
TTNAFSGEY

SEQ ID NO: 19163 - protein, 9 aa, Homo sapiens
  Table A; HLA-B*44:03; RAC1; P29S; 1
TTNAFSGEY

SEQ ID NO: 19164 - protein, 9 aa, Homo sapiens
  Table A; HLA-B*46:01; RAC1; P29S; 0
TTNAFSGEY

SEQ ID NO: 19165 - protein, 9 aa, Homo sapiens
  Table A; HLA-B*48:01; RAC1; P29S; 0
TTNAFSGEY

SEQ ID NO: 19166 - protein, 9 aa, Homo sapiens
  Table A; HLA-B*57:01; RAC1; P29S; 1
TTNAFSGEY

SEQ ID NO: 19167 - protein, 9 aa, Homo sapiens
  Table A; HLA-B*58:01; RAC1; P29S; 0
TTNAFSGEY

SEQ ID NO: 19168 - protein, 9 aa, Homo sapiens
  Table A; HLA-C*02:02; RAC1; P29S; 1
TTNAFSGEY

SEQ ID NO: 19169 - protein, 9 aa, Homo sapiens
  Table A; HLA-C*03:02; RAC1; P29S; 0
TTNAFSGEY

SEQ ID NO: 19170 - protein, 9 aa, Homo sapiens
  Table A; HLA-C*08:01; RAC1; P29S; 0
TTNAFSGEY

SEQ ID NO: 19171 - protein, 9 aa, Homo sapiens
  Table A; HLA-C*16:01; RAC1; P29S; 1
TTNAFSGEY

SEQ ID NO: 19172 - protein, 9 aa, Homo sapiens
  Table A; HLA-C*16:04; RAC1; P29S; 0
TTNAFSGEY

SEQ ID NO: 19173 - protein, 10 aa, Homo sapiens
  Table A; HLA-A*68:01; RAC1; P29S; 1
TTNAFSGEYI

SEQ ID NO: 19174 - protein, 10 aa, Homo sapiens
  Table A; HLA-A*68:02; RAC1; P29S; 0
TTNAFSGEYI

SEQ ID NO: 19175 - protein, 9 aa, Homo sapiens
  Table A; HLA-A*03:01; CTNNB1; S45F; 1
TTTAPFLSG

SEQ ID NO: 19176 - protein, 9 aa, Homo sapiens
  Table A; HLA-A*11:01; CTNNB1; S45F; 1
TTTAPFLSG

SEQ ID NO: 19177 - protein, 9 aa, Homo sapiens
  Table A; HLA-A*30:01; CTNNB1; S45F; 0
TTTAPFLSG

SEQ ID NO: 19178 - protein, 9 aa, Homo sapiens
  Table A; HLA-A*31:01; CTNNB1; S45F; 0
TTTAPFLSG

SEQ ID NO: 19179 - protein, 9 aa, Homo sapiens
  Table A; HLA-A*33:01; CTNNB1; S45F; 0
TTTAPFLSG

SEQ ID NO: 19180 - protein, 9 aa, Homo sapiens
  Table A; HLA-A*33:03; CTNNB1; S45F; 0
TTTAPFLSG

SEQ ID NO: 19181 - protein, 9 aa, Homo sapiens
  Table A; HLA-A*68:01; CTNNB1; S45F; 0
TTTAPFLSG

SEQ ID NO: 19182 - protein, 9 aa, Homo sapiens
  Table A; HLA-A*68:02; CTNNB1; S45F; 0
TTTAPFLSG

SEQ ID NO: 19183 - protein, 9 aa, Homo sapiens
  Table A; HLA-B*07:02; CTNNB1; S45F; 1
TTTAPFLSG

SEQ ID NO: 19184 - protein, 9 aa, Homo sapiens
  Table A; HLA-B*54:01; CTNNB1; S45F; 0
TTTAPFLSG

SEQ ID NO: 19185 - protein, 9 aa, Homo sapiens
  Table A; HLA-B*58:01; CTNNB1; S45F; 0
TTTAPFLSG

SEQ ID NO: 19186 - protein, 10 aa, Homo sapiens
  Table A; HLA-A*03:01; CTNNB1; S45F; 1
TTTAPFLSGK

SEQ ID NO: 19187 - protein, 10 aa, Homo sapiens
  Table A; HLA-A*03:02; CTNNB1; S45F; 0
TTTAPFLSGK

SEQ ID NO: 19188 - protein, 10 aa, Homo sapiens
  Table A; HLA-A*11:01; CTNNB1; S45F; 1
TTTAPFLSGK

SEQ ID NO: 19189 - protein, 10 aa, Homo sapiens
  Table A; HLA-A*26:03; CTNNB1; S45F; 0
TTTAPFLSGK

SEQ ID NO: 19190 - protein, 10 aa, Homo sapiens
  Table A; HLA-A*31:01; CTNNB1; S45F; 0
TTTAPFLSGK

SEQ ID NO: 19191 - protein, 10 aa, Homo sapiens
  Table A; HLA-A*33:03; CTNNB1; S45F; 0
TTTAPFLSGK

SEQ ID NO: 19192 - protein, 10 aa, Homo sapiens
  Table A; HLA-A*68:01; CTNNB1; S45F; 0
TTTAPFLSGK

SEQ ID NO: 19193 - protein, 10 aa, Homo sapiens
  Table A; HLA-A*68:02; CTNNB1; S45F; 0
TTTAPFLSGK

SEQ ID NO: 19194 - protein, 9 aa, Homo sapiens
  Table A; HLA-A*30:01; CTNNB1; S45P; 1
TTTAPPLSG

SEQ ID NO: 19195 - protein, 9 aa, Homo sapiens
  Table A; HLA-A*31:01; CTNNB1; S45P; 1
TTTAPPLSG

SEQ ID NO: 19196 - protein, 9 aa, Homo sapiens
  Table A; HLA-A*33:03; CTNNB1; S45P; 0
TTTAPPLSG

SEQ ID NO: 19197 - protein, 9 aa, Homo sapiens
  Table A; HLA-A*68:01; CTNNB1; S45P; 1
TTTAPPLSG

SEQ ID NO: 19198 - protein, 9 aa, Homo sapiens
  Table A; HLA-B*54:01; CTNNB1; S45P; 0
TTTAPPLSG

SEQ ID NO: 19199 - protein, 9 aa, Homo sapiens
  Table A; HLA-B*58:01; CTNNB1; S45P; 0
TTTAPPLSG

SEQ ID NO: 19200 - protein, 10 aa, Homo sapiens
  Table A; HLA-A*03:01; CTNNB1; S45P; 1
TTTAPPLSGK

SEQ ID NO: 19201 - protein, 10 aa, Homo sapiens
  Table A; HLA-A*03:02; CTNNB1; S45P; 0
TTTAPPLSGK

SEQ ID NO: 19202 - protein, 10 aa, Homo sapiens
  Table A; HLA-A*11:01; CTNNB1; S45P; 1
TTTAPPLSGK

SEQ ID NO: 19203 - protein, 10 aa, Homo sapiens
  Table A; HLA-A*26:01; CTNNB1; S45P; 1
TTTAPPLSGK

SEQ ID NO: 19204 - protein, 10 aa, Homo sapiens
  Table A; HLA-A*26:03; CTNNB1; S45P; 0
TTTAPPLSGK

SEQ ID NO: 19205 - protein, 10 aa, Homo sapiens
  Table A; HLA-A*31:01; CTNNB1; S45P; 1
TTTAPPLSGK

SEQ ID NO: 19206 - protein, 10 aa, Homo sapiens
  Table A; HLA-A*33:01; CTNNB1; S45P; 0
TTTAPPLSGK

SEQ ID NO: 19207 - protein, 10 aa, Homo sapiens
  Table A; HLA-A*33:03; CTNNB1; S45P; 0
TTTAPPLSGK

SEQ ID NO: 19208 - protein, 10 aa, Homo sapiens
  Table A; HLA-A*68:01; CTNNB1; S45P; 1
TTTAPPLSGK

SEQ ID NO: 19209 - protein, 10 aa, Homo sapiens
  Table A; HLA-A*68:02; CTNNB1; S45P; 0
TTTAPPLSGK

SEQ ID NO: 19210 - protein, 10 aa, Homo sapiens
  Table A; HLA-B*27:02; CTNNB1; S45P; 0
TTTAPPLSGK

SEQ ID NO: 19211 - protein, 11 aa, Homo sapiens
  Table A; HLA-A*11:01; CTNNB1; S45P; 1
TTTAPPLSGKG

SEQ ID NO: 19212 - protein, 11 aa, Homo sapiens
  Table A; HLA-A*29:02; CTNNB1; S45P; 1
TTTAPPLSGKG

SEQ ID NO: 19213 - protein, 11 aa, Homo sapiens
  Table A; HLA-A*68:02; CTNNB1; S45P; 0
TTTAPPLSGKG

SEQ ID NO: 19214 - protein, 8 aa, Homo sapiens
  Table A; HLA-C*17:01; ACVR1; R206H; 0
TVAHQITL

SEQ ID NO: 19215 - protein, 9 aa, Homo sapiens
  Table A; HLA-A*02:03; ACVR1; R206H; 0
TVAHQITLL

SEQ ID NO: 19216 - protein, 9 aa, Homo sapiens
  Table A; HLA-A*02:04; ACVR1; R206H; 0
TVAHQITLL

SEQ ID NO: 19217 - protein, 9 aa, Homo sapiens
  Table A; HLA-A*02:05; ACVR1; R206H; 0
TVAHQITLL

SEQ ID NO: 19218 - protein, 9 aa, Homo sapiens
  Table A; HLA-A*02:06; ACVR1; R206H; 0
TVAHQITLL

SEQ ID NO: 19219 - protein, 9 aa, Homo sapiens
  Table A; HLA-A*02:08; ACVR1; R206H; 0
TVAHQITLL

SEQ ID NO: 19220 - protein, 9 aa, Homo sapiens
  Table A; HLA-A*26:01; ACVR1; R206H; 0
TVAHQITLL

SEQ ID NO: 19221 - protein, 9 aa, Homo sapiens
  Table A; HLA-A*26:02; ACVR1; R206H; 0
TVAHQITLL

SEQ ID NO: 19222 - protein, 9 aa, Homo sapiens
  Table A; HLA-A*68:01; ACVR1; R206H; 0
TVAHQITLL

SEQ ID NO: 19223 - protein, 9 aa, Homo sapiens
  Table A; HLA-A*68:02; ACVR1; R206H; 0
TVAHQITLL

SEQ ID NO: 19224 - protein, 9 aa, Homo sapiens
  Table A; HLA-B*50:01; ACVR1; R206H; 0
TVAHQITLL

SEQ ID NO: 19225 - protein, 9 aa, Homo sapiens
  Table A; HLA-C*17:01; ACVR1; R206H; 0
TVAHQITLL

SEQ ID NO: 19226 - protein, 9 aa, Homo sapiens
  Table A; HLA-C*08:03; FAM135B; S11L; 0
TVEFLVELH

SEQ ID NO: 19227 - protein, 8 aa, Homo sapiens
  Table A; HLA-B*39:06; RHOA; Y42C; 0
TVFENCVA

SEQ ID NO: 19228 - protein, 10 aa, Homo sapiens
  Table A; HLA-A*68:02; RHOA; Y42C; 0
TVFENCVADI

SEQ ID NO: 19229 - protein, 9 aa, Homo sapiens
  Table A; HLA-A*02:03; BRAF; G466V; 0
TVGQRIGSV

SEQ ID NO: 19230 - protein, 9 aa, Homo sapiens
  Table A; HLA-A*02:04; XPO1; E571K; 0
TVVNKLFKF

SEQ ID NO: 19231 - protein, 9 aa, Homo sapiens
  Table A; HLA-A*23:01; XPO1; E571K; 0
TVVNKLFKF

SEQ ID NO: 19232 - protein, 9 aa, Homo sapiens
  Table A; HLA-A*24:02; XPO1; E571K; 1
TVVNKLFKF

SEQ ID NO: 19233 - protein, 9 aa, Homo sapiens
  Table A; HLA-A*26:02; XPO1; E571K; 0
TVVNKLFKF

SEQ ID NO: 19234 - protein, 9 aa, Homo sapiens
  Table A; HLA-A*29:02; XPO1; E571K; 0
TVVNKLFKF

SEQ ID NO: 19235 - protein, 9 aa, Homo sapiens
  Table A; HLA-A*68:02; XPO1; E571K; 0
TVVNKLFKF

SEQ ID NO: 19236 - protein, 9 aa, Homo sapiens
  Table A; HLA-B*57:01; XPO1; E571K; 0
TVVNKLFKF

SEQ ID NO: 19237 - protein, 8 aa, Homo sapiens
  Table A; HLA-A*03:01; TP53; S127F; 1
TYFPALNK

SEQ ID NO: 19238 - protein, 8 aa, Homo sapiens
  Table A; HLA-A*03:02; TP53; S127F; 0
TYFPALNK

SEQ ID NO: 19239 - protein, 8 aa, Homo sapiens
  Table A; HLA-A*11:01; TP53; S127F; 0
TYFPALNK

SEQ ID NO: 19240 - protein, 8 aa, Homo sapiens
  Table A; HLA-A*31:01; TP53; S127F; 0
TYFPALNK

SEQ ID NO: 19241 - protein, 8 aa, Homo sapiens
  Table A; HLA-A*33:03; TP53; S127F; 0
TYFPALNK

SEQ ID NO: 19242 - protein, 9 aa, Homo sapiens
  Table A; HLA-A*23:01; TP53; S127F; 0
TYFPALNKM

SEQ ID NO: 19243 - protein, 9 aa, Homo sapiens
  Table A; HLA-A*24:02; TP53; S127F; 1
TYFPALNKM

SEQ ID NO: 19244 - protein, 9 aa, Homo sapiens
  Table A; HLA-A*33:03; TP53; S127F; 0
TYFPALNKM

SEQ ID NO: 19245 - protein, 9 aa, Homo sapiens
  Table A; HLA-C*06:02; TP53; S127F; 1
TYFPALNKM

SEQ ID NO: 19246 - protein, 9 aa, Homo sapiens
  Table A; HLA-C*07:02; TP53; S127F; 1
TYFPALNKM

SEQ ID NO: 19247 - protein, 9 aa, Homo sapiens
  Table A; HLA-C*14:02; TP53; S127F; 0
TYFPALNKM

SEQ ID NO: 19248 - protein, 9 aa, Homo sapiens
  Table A; HLA-C*14:03; TP53; S127F; 0
TYFPALNKM

SEQ ID NO: 19249 - protein, 10 aa, Homo sapiens
  Table A; HLA-A*23:01; TP53; S127F; 0
TYFPALNKMF

SEQ ID NO: 19250 - protein, 10 aa, Homo sapiens
  Table A; HLA-A*24:02; TP53; S127F; 1
TYFPALNKMF

SEQ ID NO: 19251 - protein, 10 aa, Homo sapiens
  Table A; HLA-C*14:02; TP53; S127F; 0
TYFPALNKMF

SEQ ID NO: 19252 - protein, 9 aa, Homo sapiens
  Table A; HLA-A*23:01; MTOR; S2215Y; 0
TYLRKNLSI

SEQ ID NO: 19253 - protein, 11 aa, Homo sapiens
  Table A; HLA-A*33:03; MTOR; S2215Y; 0
TYLRKNLSIQR

SEQ ID NO: 19254 - protein, 8 aa, Homo sapiens
  Table A; HLA-A*33:03; PIK3CA; V344M; 0
TYMNLNIR

SEQ ID NO: 19255 - protein, 9 aa, Homo sapiens
  Table A; HLA-B*48:01; TP53; R110L; 0
TYQGSYGFL

SEQ ID NO: 19256 - protein, 9 aa, Homo sapiens
  Table A; HLA-C*14:02; TP53; R110L; 0
TYQGSYGFL

SEQ ID NO: 19257 - protein, 9 aa, Homo sapiens
  Table A; HLA-C*14:03; TP53; R110L; 0
TYQGSYGFL

SEQ ID NO: 19258 - protein, 10 aa, Homo sapiens
  Table A; HLA-A*02:04; TP53; R110L; 0
TYQGSYGFLL

SEQ ID NO: 19259 - protein, 10 aa, Homo sapiens
  Table A; HLA-A*23:01; TP53; R110L; 0
TYQGSYGFLL

SEQ ID NO: 19260 - protein, 10 aa, Homo sapiens
  Table A; HLA-A*24:02; TP53; R110L; 1
TYQGSYGFLL

SEQ ID NO: 19261 - protein, 8 aa, Homo sapiens
  Table A; HLA-A*03:02; TP53; L130F; 0
TYSPAFNK

SEQ ID NO: 19262 - protein, 8 aa, Homo sapiens
  Table A; HLA-A*11:01; TP53; L130F; 0
TYSPAFNK

SEQ ID NO: 19263 - protein, 8 aa, Homo sapiens
  Table A; HLA-A*33:01; TP53; L130F; 0
TYSPAFNK

SEQ ID NO: 19264 - protein, 8 aa, Homo sapiens
  Table A; HLA-A*33:03; TP53; L130F; 0
TYSPAFNK

SEQ ID NO: 19265 - protein, 8 aa, Homo sapiens
  Table A; HLA-A*68:01; TP53; L130F; 0
TYSPAFNK

SEQ ID NO: 19266 - protein, 9 aa, Homo sapiens
  Table A; HLA-A*23:01; TP53; L130F; 0
TYSPAFNKM

SEQ ID NO: 19267 - protein, 9 aa, Homo sapiens
  Table A; HLA-A*24:02; TP53; L130F; 0
TYSPAFNKM

SEQ ID NO: 19268 - protein, 9 aa, Homo sapiens
  Table A; HLA-A*29:02; TP53; L130F; 0
TYSPAFNKM

SEQ ID NO: 19269 - protein, 9 aa, Homo sapiens
  Table A; HLA-A*33:03; TP53; L130F; 0
TYSPAFNKM

SEQ ID NO: 19270 - protein, 9 aa, Homo sapiens
  Table A; HLA-B*35:03; TP53; L130F; 0
TYSPAFNKM

SEQ ID NO: 19271 - protein, 9 aa, Homo sapiens
  Table A; HLA-B*38:01; TP53; L130F; 0
TYSPAFNKM

SEQ ID NO: 19272 - protein, 9 aa, Homo sapiens
  Table A; HLA-B*39:01; TP53; L130F; 0
TYSPAFNKM

SEQ ID NO: 19273 - protein, 9 aa, Homo sapiens
  Table A; HLA-C*07:02; TP53; L130F; 1
TYSPAFNKM

SEQ ID NO: 19274 - protein, 9 aa, Homo sapiens
  Table A; HLA-C*14:02; TP53; L130F; 0
TYSPAFNKM

SEQ ID NO: 19275 - protein, 9 aa, Homo sapiens
  Table A; HLA-C*14:03; TP53; L130F; 0
TYSPAFNKM

SEQ ID NO: 19276 - protein, 10 aa, Homo sapiens
  Table A; HLA-A*23:01; TP53; L130F; 0
TYSPAFNKMF

SEQ ID NO: 19277 - protein, 10 aa, Homo sapiens
  Table A; HLA-A*24:02; TP53; L130F; 0
TYSPAFNKMF

SEQ ID NO: 19278 - protein, 10 aa, Homo sapiens
  Table A; HLA-B*57:01; TP53; L130F; 0
TYSPAFNKMF

SEQ ID NO: 19279 - protein, 10 aa, Homo sapiens
  Table A; HLA-C*14:02; TP53; L130F; 0
TYSPAFNKMF

SEQ ID NO: 19280 - protein, 11 aa, Homo sapiens
  Table A; HLA-A*23:01; TP53; C135F; 0
TYSPALNKMFF

SEQ ID NO: 19281 - protein, 11 aa, Homo sapiens
  Table A; HLA-A*24:02; TP53; C135F; 0
TYSPALNKMFF

SEQ ID NO: 19282 - protein, 10 aa, Homo sapiens
  Table A; HLA-A*23:01; TP53; F134L; 0
TYSPALNKML

SEQ ID NO: 19283 - protein, 10 aa, Homo sapiens
  Table A; HLA-A*24:02; TP53; F134L; 0
TYSPALNKML

SEQ ID NO: 19284 - protein, 10 aa, Homo sapiens
  Table A; HLA-C*14:02; TP53; F134L; 0
TYSPALNKML

SEQ ID NO: 19285 - protein, 9 aa, Homo sapiens
  Table A; HLA-A*23:01; TP53; K132N; 0
TYSPALNNM

SEQ ID NO: 19286 - protein, 9 aa, Homo sapiens
  Table A; HLA-A*24:02; TP53; K132N; 0
TYSPALNNM

SEQ ID NO: 19287 - protein, 9 aa, Homo sapiens
  Table A; HLA-A*33:03; TP53; K132N; 0
TYSPALNNM

SEQ ID NO: 19288 - protein, 9 aa, Homo sapiens
  Table A; HLA-B*38:01; TP53; K132N; 0
TYSPALNNM

SEQ ID NO: 19289 - protein, 9 aa, Homo sapiens
  Table A; HLA-B*39:01; TP53; K132N; 0
TYSPALNNM

SEQ ID NO: 19290 - protein, 9 aa, Homo sapiens
  Table A; HLA-C*14:02; TP53; K132N; 0
TYSPALNNM

SEQ ID NO: 19291 - protein, 9 aa, Homo sapiens
  Table A; HLA-C*14:03; TP53; K132N; 0
TYSPALNNM

SEQ ID NO: 19292 - protein, 10 aa, Homo sapiens
  Table A; HLA-A*23:01; TP53; K132N; 0
TYSPALNNMF

SEQ ID NO: 19293 - protein, 10 aa, Homo sapiens
  Table A; HLA-A*24:02; TP53; K132N; 0
TYSPALNNMF

SEQ ID NO: 19294 - protein, 10 aa, Homo sapiens
  Table A; HLA-A*29:02; TP53; K132N; 0
TYSPALNNMF

SEQ ID NO: 19295 - protein, 10 aa, Homo sapiens
  Table A; HLA-A*31:01; TP53; K132N; 0
TYSPALNNMF

SEQ ID NO: 19296 - protein, 10 aa, Homo sapiens
  Table A; HLA-B*38:01; TP53; K132N; 0
TYSPALNNMF

SEQ ID NO: 19297 - protein, 10 aa, Homo sapiens
  Table A; HLA-B*39:01; TP53; K132N; 0
TYSPALNNMF

SEQ ID NO: 19298 - protein, 10 aa, Homo sapiens
  Table A; HLA-B*44:05; TP53; K132N; 0
TYSPALNNMF

SEQ ID NO: 19299 - protein, 10 aa, Homo sapiens
  Table A; HLA-B*57:01; TP53; K132N; 0
TYSPALNNMF

SEQ ID NO: 19300 - protein, 10 aa, Homo sapiens
  Table A; HLA-B*58:01; TP53; K132N; 0
TYSPALNNMF

SEQ ID NO: 19301 - protein, 10 aa, Homo sapiens
  Table A; HLA-C*07:02; TP53; K132N; 1
TYSPALNNMF

SEQ ID NO: 19302 - protein, 10 aa, Homo sapiens
  Table A; HLA-C*14:02; TP53; K132N; 0
TYSPALNNMF

SEQ ID NO: 19303 - protein, 10 aa, Homo sapiens
  Table A; HLA-C*14:03; TP53; K132N; 0
TYSPALNNMF

SEQ ID NO: 19304 - protein, 8 aa, Homo sapiens
  Table A; HLA-A*11:01; TP53; K132R; 0
TYSPALNR

SEQ ID NO: 19305 - protein, 8 aa, Homo sapiens
  Table A; HLA-A*31:01; TP53; K132R; 0
TYSPALNR

SEQ ID NO: 19306 - protein, 8 aa, Homo sapiens
  Table A; HLA-A*33:01; TP53; K132R; 0
TYSPALNR

SEQ ID NO: 19307 - protein, 8 aa, Homo sapiens
  Table A; HLA-A*33:03; TP53; K132R; 0
TYSPALNR

SEQ ID NO: 19308 - protein, 8 aa, Homo sapiens
  Table A; HLA-A*68:01; TP53; K132R; 0
TYSPALNR

SEQ ID NO: 19309 - protein, 8 aa, Homo sapiens
  Table A; HLA-B*27:05; TP53; K132R; 0
TYSPALNR

SEQ ID NO: 19310 - protein, 9 aa, Homo sapiens
  Table A; HLA-A*23:01; TP53; K132R; 0
TYSPALNRM

SEQ ID NO: 19311 - protein, 9 aa, Homo sapiens
  Table A; HLA-A*24:02; TP53; K132R; 1
TYSPALNRM

SEQ ID NO: 19312 - protein, 9 aa, Homo sapiens
  Table A; HLA-A*29:02; TP53; K132R; 0
TYSPALNRM

SEQ ID NO: 19313 - protein, 9 aa, Homo sapiens
  Table A; HLA-A*31:01; TP53; K132R; 0
TYSPALNRM

SEQ ID NO: 19314 - protein, 9 aa, Homo sapiens
  Table A; HLA-A*33:03; TP53; K132R; 0
TYSPALNRM

SEQ ID NO: 19315 - protein, 9 aa, Homo sapiens
  Table A; HLA-B*07:02; TP53; K132R; 1
TYSPALNRM

SEQ ID NO: 19316 - protein, 9 aa, Homo sapiens
  Table A; HLA-B*38:01; TP53; K132R; 0
TYSPALNRM

SEQ ID NO: 19317 - protein, 9 aa, Homo sapiens
  Table A; HLA-B*39:01; TP53; K132R; 0
TYSPALNRM

SEQ ID NO: 19318 - protein, 9 aa, Homo sapiens
  Table A; HLA-C*06:02; TP53; K132R; 1
TYSPALNRM

SEQ ID NO: 19319 - protein, 9 aa, Homo sapiens
  Table A; HLA-C*07:02; TP53; K132R; 1
TYSPALNRM

SEQ ID NO: 19320 - protein, 9 aa, Homo sapiens
  Table A; HLA-C*14:02; TP53; K132R; 0
TYSPALNRM

SEQ ID NO: 19321 - protein, 9 aa, Homo sapiens
  Table A; HLA-C*14:03; TP53; K132R; 0
TYSPALNRM

SEQ ID NO: 19322 - protein, 10 aa, Homo sapiens
  Table A; HLA-A*23:01; TP53; K132R; 0
TYSPALNRMF

SEQ ID NO: 19323 - protein, 10 aa, Homo sapiens
  Table A; HLA-A*24:02; TP53; K132R; 1
TYSPALNRMF

SEQ ID NO: 19324 - protein, 10 aa, Homo sapiens
  Table A; HLA-B*57:01; TP53; K132R; 0
TYSPALNRMF

SEQ ID NO: 19325 - protein, 10 aa, Homo sapiens
  Table A; HLA-C*06:02; TP53; K132R; 1
TYSPALNRMF

SEQ ID NO: 19326 - protein, 10 aa, Homo sapiens
  Table A; HLA-C*14:02; TP53; K132R; 0
TYSPALNRMF

SEQ ID NO: 19327 - protein, 9 aa, Homo sapiens
  Table A; HLA-A*23:01; CTNNB1; K335I; 0
TYTYEILLW

SEQ ID NO: 19328 - protein, 9 aa, Homo sapiens
  Table A; HLA-A*24:02; CTNNB1; K335I; 1
TYTYEILLW

SEQ ID NO: 19329 - protein, 8 aa, Homo sapiens
  Table A; HLA-A*33:03; PIK3CA; N345K; 0
TYVKLNIR

SEQ ID NO: 19330 - protein, 9 aa, Homo sapiens
  Table A; HLA-B*15:01; FBXW7; R505G; 1
VAAVGCVQY

SEQ ID NO: 19331 - protein, 9 aa, Homo sapiens
  Table A; HLA-B*15:03; FBXW7; R505G; 0
VAAVGCVQY

SEQ ID NO: 19332 - protein, 9 aa, Homo sapiens
  Table A; HLA-B*35:01; FBXW7; R505G; 1
VAAVGCVQY

SEQ ID NO: 19333 - protein, 9 aa, Homo sapiens
  Table A; HLA-B*35:08; FBXW7; R505G; 0
VAAVGCVQY

SEQ ID NO: 19334 - protein, 9 aa, Homo sapiens
  Table A; HLA-B*46:01; FBXW7; R505G; 0
VAAVGCVQY

SEQ ID NO: 19335 - protein, 9 aa, Homo sapiens
  Table A; HLA-B*58:01; FBXW7; R505G; 0
VAAVGCVQY

SEQ ID NO: 19336 - protein, 9 aa, Homo sapiens
  Table A; HLA-C*03:02; FBXW7; R505G; 0
VAAVGCVQY

SEQ ID NO: 19337 - protein, 9 aa, Homo sapiens
  Table A; HLA-C*16:01; FBXW7; R505G; 0
VAAVGCVQY

SEQ ID NO: 19338 - protein, 9 aa, Homo sapiens
  Table A; HLA-C*16:02; FBXW7; R505G; 0
VAAVGCVQY

SEQ ID NO: 19339 - protein, 11 aa, Homo sapiens
  Table A; HLA-C*08:01; SIRPA; V233I; 0
VAHITLQGDPL

SEQ ID NO: 19340 - protein, 8 aa, Homo sapiens
  Table A; HLA-C*17:01; ACVR1; R206H; 0
VAHQITLL

SEQ ID NO: 19341 - protein, 9 aa, Homo sapiens
  Table A; HLA-A*01:01; KEAP1; R470C; 1
VAVLNCLLY

SEQ ID NO: 19342 - protein, 9 aa, Homo sapiens
  Table A; HLA-B*35:01; KEAP1; R470C; 1
VAVLNCLLY

SEQ ID NO: 19343 - protein, 9 aa, Homo sapiens
  Table A; HLA-B*15:01; SF3B1; R625C; 0
VCNTTARAF

SEQ ID NO: 19344 - protein, 9 aa, Homo sapiens
  Table A; HLA-B*46:01; SF3B1; R625C; 0
VCNTTARAF

SEQ ID NO: 19345 - protein, 9 aa, Homo sapiens
  Table A; HLA-C*03:03; SF3B1; R625C; 0
VCNTTARAF

SEQ ID NO: 19346 - protein, 9 aa, Homo sapiens
  Table A; HLA-C*03:04; SF3B1; R625C; 0
VCNTTARAF

SEQ ID NO: 19347 - protein, 9 aa, Homo sapiens
  Table A; HLA-C*16:01; SF3B1; R625C; 0
VCNTTARAF

SEQ ID NO: 19348 - protein, 8 aa, Homo sapiens
  Table A; HLA-C*08:03; SF3B1; K700E; 0
VDEQQEVR

SEQ ID NO: 19349 - protein, 9 aa, Homo sapiens
  Table A; HLA-B*48:01; SF3B1; K700E; 0
VDEQQEVRT

SEQ ID NO: 19350 - protein, 9 aa, Homo sapiens
  Table A; HLA-C*08:03; SF3B1; K700E; 0
VDEQQEVRT

SEQ ID NO: 19351 - protein, 10 aa, Homo sapiens
  Table A; HLA-B*40:02; SF3B1; K700E; 0
VDEQQEVRTI

SEQ ID NO: 19352 - protein, 10 aa, Homo sapiens
  Table A; HLA-B*44:05; SF3B1; K700E; 0
VDEQQEVRTI

SEQ ID NO: 19353 - protein, 10 aa, Homo sapiens
  Table A; HLA-C*08:03; SF3B1; K700E; 0
VDEQQEVRTI

SEQ ID NO: 19354 - protein, 9 aa, Homo sapiens
  Table A; HLA-B*07:02; SMAD4; R361C; 1
VDPSGGDCF

SEQ ID NO: 19355 - protein, 9 aa, Homo sapiens
  Table A; HLA-B*38:01; SMAD4; R361C; 0
VDPSGGDCF

SEQ ID NO: 19356 - protein, 9 aa, Homo sapiens
  Table A; HLA-B*38:01; SMAD4; R361H; 0
VDPSGGDHF

SEQ ID NO: 19357 - protein, 9 aa, Homo sapiens
  Table A; HLA-B*44:05; SMAD4; R361H; 0
VDPSGGDHF

SEQ ID NO: 19358 - protein, 9 aa, Homo sapiens
  Table A; HLA-B*48:01; SMARCA4; G1232S; 0
VDQKVIQAS

SEQ ID NO: 19359 - protein, 10 aa, Homo sapiens
  Table A; HLA-B*40:02; SMARCA4; G1232S; 0
VDQKVIQASM

SEQ ID NO: 19360 - protein, 10 aa, Homo sapiens
  Table A; HLA-B*44:05; SMARCA4; G1232S; 0
VDQKVIQASM

SEQ ID NO: 19361 - protein, 11 aa, Homo sapiens
  Table A; HLA-A*23:01; TP53; V157F; 0
VDSTPPPGTRF

SEQ ID NO: 19362 - protein, 11 aa, Homo sapiens
  Table A; HLA-B*44:05; TP53; V157F; 0
VDSTPPPGTRF

SEQ ID NO: 19363 - protein, 11 aa, Homo sapiens
  Table A; HLA-B*48:01; TP53; V157F; 0
VDSTPPPGTRF

SEQ ID NO: 19364 - protein, 11 aa, Homo sapiens
  Table A; HLA-B*58:01; TP53; V157F; 0
VDSTPPPGTRF

SEQ ID NO: 19365 - protein, 10 aa, Homo sapiens
  Table A; HLA-A*68:01; TP53; P151S; 0
VDSTSPPGTR

SEQ ID NO: 19366 - protein, 10 aa, Homo sapiens
  Table A; HLA-A*68:02; TP53; P151S; 0
VDSTSPPGTR

SEQ ID NO: 19367 - protein, 10 aa, Homo sapiens
  Table A; HLA-B*27:02; TP53; P151S; 0
VDSTSPPGTR

SEQ ID NO: 19368 - protein, 11 aa, Homo sapiens
  Table A; HLA-A*68:02; TP53; P151S; 0
VDSTSPPGTRV

SEQ ID NO: 19369 - protein, 11 aa, Homo sapiens
  Table A; HLA-B*48:01; TP53; P151S; 0
VDSTSPPGTRV

SEQ ID NO: 19370 - protein, 10 aa, Homo sapiens
  Table A; HLA-A*23:01; TP53; Y205C; 0
VECLDDRNTF

SEQ ID NO: 19371 - protein, 10 aa, Homo sapiens
  Table A; HLA-B*44:03; TP53; Y205C; 0
VECLDDRNTF

SEQ ID NO: 19372 - protein, 10 aa, Homo sapiens
  Table A; HLA-B*44:05; TP53; Y205C; 0
VECLDDRNTF

SEQ ID NO: 19373 - protein, 8 aa, Homo sapiens
  Table A; HLA-B*18:01; FAM135B; S11L; 0
VEFLVELH

SEQ ID NO: 19374 - protein, 10 aa, Homo sapiens
  Table A; HLA-B*44:03; FAM135B; S11L; 0
VEFLVELHKF

SEQ ID NO: 19375 - protein, 9 aa, Homo sapiens
  Table A; HLA-B*40:02; TP53; Y205C; 0
VEGNLRVEC

SEQ ID NO: 19376 - protein, 9 aa, Homo sapiens
  Table A; HLA-B*41:02; TP53; Y205C; 0
VEGNLRVEC

SEQ ID NO: 19377 - protein, 9 aa, Homo sapiens
  Table A; HLA-B*50:01; TP53; Y205C; 0
VEGNLRVEC

SEQ ID NO: 19378 - protein, 10 aa, Homo sapiens
  Table A; HLA-B*40:01; TP53; Y205C; 0
VEGNLRVECL

SEQ ID NO: 19379 - protein, 10 aa, Homo sapiens
  Table A; HLA-B*40:02; TP53; Y205C; 0
VEGNLRVECL

SEQ ID NO: 19380 - protein, 9 aa, Homo sapiens
  Table A; HLA-B*40:02; CNTNAP2; G362E; 0
VENLSFSCV

SEQ ID NO: 19381 - protein, 9 aa, Homo sapiens
  Table A; HLA-B*49:01; CNTNAP2; G362E; 0
VENLSFSCV

SEQ ID NO: 19382 - protein, 9 aa, Homo sapiens
  Table A; HLA-B*50:01; CNTNAP2; G362E; 0
VENLSFSCV

SEQ ID NO: 19383 - protein, 9 aa, Homo sapiens
  Table A; HLA-A*23:01; CNTNAP2; T373M; 0
VEPYMVPVF

SEQ ID NO: 19384 - protein, 9 aa, Homo sapiens
  Table A; HLA-B*18:01; CNTNAP2; T373M; 1
VEPYMVPVF

SEQ ID NO: 19385 - protein, 9 aa, Homo sapiens
  Table A; HLA-B*40:02; CNTNAP2; T373M; 0
VEPYMVPVF

SEQ ID NO: 19386 - protein, 9 aa, Homo sapiens
  Table A; HLA-B*44:05; CNTNAP2; T373M; 0
VEPYMVPVF

SEQ ID NO: 19387 - protein, 10 aa, Homo sapiens
  Table A; HLA-A*23:01; CNTNAP2; T373M; 0
VEPYMVPVFF

SEQ ID NO: 19388 - protein, 9 aa, Homo sapiens
  Table A; HLA-A*23:01; SPOP; M117V; 0
VESQRAYRF

SEQ ID NO: 19389 - protein, 9 aa, Homo sapiens
  Table A; HLA-B*37:01; SPOP; M117V; 0
VESQRAYRF

SEQ ID NO: 19390 - protein, 8 aa, Homo sapiens
  Table A; HLA-A*23:01; CTCF; K365T; 0
VEVSTLKR

SEQ ID NO: 19391 - protein, 8 aa, Homo sapiens
  Table A; HLA-A*23:01; TRRAP; S722F; 0
VFGSVFLF

SEQ ID NO: 19392 - protein, 8 aa, Homo sapiens
  Table A; HLA-A*24:02; TRRAP; S722F; 1
VFGSVFLF

SEQ ID NO: 19393 - protein, 8 aa, Homo sapiens
  Table A; HLA-A*29:02; TRRAP; S722F; 0
VFGSVFLF

SEQ ID NO: 19394 - protein, 8 aa, Homo sapiens
  Table A; HLA-C*14:02; TRRAP; S722F; 0
VFGSVFLF

SEQ ID NO: 19395 - protein, 9 aa, Homo sapiens
  Table A; HLA-A*29:02; TRRAP; S722F; 0
VFGSVFLFA

SEQ ID NO: 19396 - protein, 8 aa, Homo sapiens
  Table A; HLA-A*03:02; KRAS; G12A; 0
VGAAGVGK

SEQ ID NO: 19397 - protein, 9 aa, Homo sapiens
  Table A; HLA-A*02:05; KRAS; G12A; 0
VGAAGVGKS

SEQ ID NO: 19398 - protein, 11 aa, Homo sapiens
  Table A; HLA-B*08:01; KRAS; G12A; 1
VGAAGVGKSAL

SEQ ID NO: 19399 - protein, 11 aa, Homo sapiens
  Table A; HLA-B*08:01; NRAS; G12C; 1
VGACGVGKSAL

SEQ ID NO: 19400 - protein, 8 aa, Homo sapiens
  Table A; HLA-A*03:02; KRAS; G12D; 1
VGADGVGK

SEQ ID NO: 19401 - protein, 8 aa, Homo sapiens
  Table A; HLA-A*03:02; NRAS; G12D; 0
VGADGVGK

SEQ ID NO: 19402 - protein, 8 aa, Homo sapiens
  Table A; HLA-A*11:01; NRAS; G12D; 1
VGADGVGK

SEQ ID NO: 19403 - protein, 9 aa, Homo sapiens
  Table A; HLA-A*02:05; KRAS; G12D; 1
VGADGVGKS

SEQ ID NO: 19404 - protein, 9 aa, Homo sapiens
  Table A; HLA-A*02:05; NRAS; G12D; 0
VGADGVGKS

SEQ ID NO: 19405 - protein, 10 aa, Homo sapiens
  Table A; HLA-A*02:05; KRAS; G12D; 1
VGADGVGKSA

SEQ ID NO: 19406 - protein, 10 aa, Homo sapiens
  Table A; HLA-A*02:05; NRAS; G12D; 0
VGADGVGKSA

SEQ ID NO: 19407 - protein, 10 aa, Homo sapiens
  Table A; HLA-B*39:06; NRAS; G12D; 0
VGADGVGKSA

SEQ ID NO: 19408 - protein, 11 aa, Homo sapiens
  Table A; HLA-B*08:01; KRAS; G12D; 1
VGADGVGKSAL

SEQ ID NO: 19409 - protein, 11 aa, Homo sapiens
  Table A; HLA-B*39:01; KRAS; G12D; 1
VGADGVGKSAL

SEQ ID NO: 19410 - protein, 11 aa, Homo sapiens
  Table A; HLA-C*08:01; KRAS; G12D; 0
VGADGVGKSAL

SEQ ID NO: 19411 - protein, 11 aa, Homo sapiens
  Table A; HLA-B*07:02; NRAS; G12D; 1
VGADGVGKSAL

SEQ ID NO: 19412 - protein, 11 aa, Homo sapiens
  Table A; HLA-B*08:01; NRAS; G12D; 1
VGADGVGKSAL

SEQ ID NO: 19413 - protein, 11 aa, Homo sapiens
  Table A; HLA-B*39:01; NRAS; G12D; 0
VGADGVGKSAL

SEQ ID NO: 19414 - protein, 11 aa, Homo sapiens
  Table A; HLA-C*08:01; NRAS; G12D; 0
VGADGVGKSAL

SEQ ID NO: 19415 - protein, 11 aa, Homo sapiens
  Table A; HLA-C*08:03; NRAS; G12D; 0
VGADGVGKSAL

SEQ ID NO: 19416 - protein, 9 aa, Homo sapiens
  Table A; HLA-A*02:05; KRAS; G13D; 0
VGAGDVGKS

SEQ ID NO: 19417 - protein, 11 aa, Homo sapiens
  Table A; HLA-B*08:01; KRAS; G13D; 1
VGAGDVGKSAL

SEQ ID NO: 19418 - protein, 11 aa, Homo sapiens
  Table A; HLA-B*48:01; KRAS; G13D; 0
VGAGDVGKSAL

SEQ ID NO: 19419 - protein, 11 aa, Homo sapiens
  Table A; HLA-C*08:01; KRAS; G13D; 0
VGAGDVGKSAL

SEQ ID NO: 19420 - protein, 11 aa, Homo sapiens
  Table A; HLA-B*08:01; NRAS; G13R; 1
VGAGRVGKSAL

SEQ ID NO: 19421 - protein, 8 aa, Homo sapiens
  Table A; HLA-A*03:02; KRAS; G12S; 0
VGASGVGK

SEQ ID NO: 19422 - protein, 11 aa, Homo sapiens
  Table A; HLA-B*08:01; KRAS; G12S; 1
VGASGVGKSAL

SEQ ID NO: 19423 - protein, 8 aa, Homo sapiens
  Table A; HLA-A*03:01; KRAS; G12V; 1
VGAVGVGK

SEQ ID NO: 19424 - protein, 8 aa, Homo sapiens
  Table A; HLA-A*03:02; KRAS; G12V; 1
VGAVGVGK

SEQ ID NO: 19425 - protein, 8 aa, Homo sapiens
  Table A; HLA-A*11:01; KRAS; G12V; 1
VGAVGVGK

SEQ ID NO: 19426 - protein, 11 aa, Homo sapiens
  Table A; HLA-B*08:01; KRAS; G12V; 1
VGAVGVGKSAL

SEQ ID NO: 19427 - protein, 9 aa, Homo sapiens
  Table A; HLA-A*31:01; KEAP1; G480W; 0
VGGFDWTNR

SEQ ID NO: 19428 - protein, 8 aa, Homo sapiens
  Table A; HLA-B*58:01; FBXW7; G423V; 0
VGHTGVVW

SEQ ID NO: 19429 - protein, 11 aa, Homo sapiens
  Table A; HLA-A*31:01; PIK3CA; R108H; 0
VGNHEEKILNR

SEQ ID NO: 19430 - protein, 11 aa, Homo sapiens
  Table A; HLA-A*31:01; PIK3CA; K111N; 0
VGNREENILNR

SEQ ID NO: 19431 - protein, 11 aa, Homo sapiens
  Table A; HLA-B*27:02; FBXW7; R689W; 0
VGSWNGTEETK

SEQ ID NO: 19432 - protein, 8 aa, Homo sapiens
  Table A; HLA-B*07:02; KRAS; G12V; 1
VGVGKSAL

SEQ ID NO: 19433 - protein, 8 aa, Homo sapiens
  Table A; HLA-B*08:01; KRAS; G12V; 1
VGVGKSAL

SEQ ID NO: 19434 - protein, 8 aa, Homo sapiens
  Table A; HLA-B*14:02; KRAS; G12V; 1
VGVGKSAL

SEQ ID NO: 19435 - protein, 8 aa, Homo sapiens
  Table A; HLA-B*41:02; KRAS; G12V; 1
VGVGKSAL

SEQ ID NO: 19436 - protein, 8 aa, Homo sapiens
  Table A; HLA-B*48:01; KRAS; G12V; 0
VGVGKSAL

SEQ ID NO: 19437 - protein, 10 aa, Homo sapiens
  Table A; HLA-B*13:02; KRAS; G12V; 1
VGVGKSALTI

SEQ ID NO: 19438 - protein, 9 aa, Homo sapiens
  Table A; HLA-B*15:01; KEAP1; D422N; 0
VGVINGHIY

SEQ ID NO: 19439 - protein, 9 aa, Homo sapiens
  Table A; HLA-B*15:03; KEAP1; D422N; 0
VGVINGHIY

SEQ ID NO: 19440 - protein, 9 aa, Homo sapiens
  Table A; HLA-B*35:01; KEAP1; D422N; 0
VGVINGHIY

SEQ ID NO: 19441 - protein, 9 aa, Homo sapiens
  Table A; HLA-B*46:01; KEAP1; D422N; 0
VGVINGHIY

SEQ ID NO: 19442 - protein, 9 aa, Homo sapiens
  Table A; HLA-B*58:01; KEAP1; D422N; 0
VGVINGHIY

SEQ ID NO: 19443 - protein, 9 aa, Homo sapiens
  Table A; HLA-C*16:01; KEAP1; D422N; 0
VGVINGHIY

SEQ ID NO: 19444 - protein, 9 aa, Homo sapiens
  Table A; HLA-C*16:02; KEAP1; D422N; 0
VGVINGHIY

SEQ ID NO: 19445 - protein, 9 aa, Homo sapiens
  Table A; HLA-C*16:04; KEAP1; D422N; 0
VGVINGHIY

SEQ ID NO: 19446 - protein, 8 aa, Homo sapiens
  Table A; HLA-B*38:01; CDH11; K357T; 0
VHIDPTFI

SEQ ID NO: 19447 - protein, 8 aa, Homo sapiens
  Table A; HLA-B*39:06; CDH11; K357T; 0
VHIDPTFI

SEQ ID NO: 19448 - protein, 8 aa, Homo sapiens
  Table A; HLA-B*39:06; SF3B1; R625H; 0
VHNTTARA

SEQ ID NO: 19449 - protein, 9 aa, Homo sapiens
  Table A; HLA-A*23:01; SF3B1; R625H; 0
VHNTTARAF

SEQ ID NO: 19450 - protein, 9 aa, Homo sapiens
  Table A; HLA-B*15:01; SF3B1; R625H; 1
VHNTTARAF

SEQ ID NO: 19451 - protein, 9 aa, Homo sapiens
  Table A; HLA-B*15:03; SF3B1; R625H; 0
VHNTTARAF

SEQ ID NO: 19452 - protein, 9 aa, Homo sapiens
  Table A; HLA-B*15:10; SF3B1; R625H; 0
VHNTTARAF

SEQ ID NO: 19453 - protein, 9 aa, Homo sapiens
  Table A; HLA-B*38:01; SF3B1; R625H; 0
VHNTTARAF

SEQ ID NO: 19454 - protein, 8 aa, Homo sapiens
  Table A; HLA-B*13:02; PTPRC; Q895H; 0
VHVEAQYI

SEQ ID NO: 19455 - protein, 8 aa, Homo sapiens
  Table A; HLA-B*15:10; PTPRC; Q895H; 0
VHVEAQYI

SEQ ID NO: 19456 - protein, 8 aa, Homo sapiens
  Table A; HLA-B*38:01; PTPRC; Q895H; 0
VHVEAQYI

SEQ ID NO: 19457 - protein, 8 aa, Homo sapiens
  Table A; HLA-B*39:01; PTPRC; Q895H; 0
VHVEAQYI

SEQ ID NO: 19458 - protein, 8 aa, Homo sapiens
  Table A; HLA-B*39:06; PTPRC; Q895H; 0
VHVEAQYI

SEQ ID NO: 19459 - protein, 9 aa, Homo sapiens
  Table A; HLA-B*15:10; PTPRC; Q895H; 0
VHVEAQYIL

SEQ ID NO: 19460 - protein, 9 aa, Homo sapiens
  Table A; HLA-B*38:01; PTPRC; Q895H; 0
VHVEAQYIL

SEQ ID NO: 19461 - protein, 10 aa, Homo sapiens
  Table A; HLA-B*38:01; PTPRC; Q895H; 0
VHVEAQYILI

SEQ ID NO: 19462 - protein, 8 aa, Homo sapiens
  Table A; HLA-B*39:06; CHD4; R975H; 0
VHVELSPM

SEQ ID NO: 19463 - protein, 10 aa, Homo sapiens
  Table A; HLA-B*27:02; CHD4; R975H; 0
VHVELSPMQK

SEQ ID NO: 19464 - protein, 10 aa, Homo sapiens
  Table A; HLA-A*02:01; SIRPA; V233I; 1
VICEVAHITL

SEQ ID NO: 19465 - protein, 10 aa, Homo sapiens
  Table A; HLA-A*02:04; SIRPA; V233I; 0
VICEVAHITL

SEQ ID NO: 19466 - protein, 9 aa, Homo sapiens
  Table A; HLA-C*08:02; CNTNAP2; R283H; 0
VIEHQGRSI

SEQ ID NO: 19467 - protein, 10 aa, Homo sapiens
  Table A; HLA-C*08:03; PIK3CA; R108H; 0
VIEPVGNHEE

SEQ ID NO: 19468 - protein, 8 aa, Homo sapiens
  Table A; HLA-A*33:03; PIK3CA; G106V; 0
VIEPVVNR

SEQ ID NO: 19469 - protein, 8 aa, Homo sapiens
  Table A; HLA-A*68:01; PIK3CA; G106V; 0
VIEPVVNR

SEQ ID NO: 19470 - protein, 8 aa, Homo sapiens
  Table A; HLA-C*08:03; CTNNB1; G34V; 0
VIHSGATT

SEQ ID NO: 19471 - protein, 9 aa, Homo sapiens
  Table A; HLA-A*02:03; CTNNB1; G34V; 0
VIHSGATTT

SEQ ID NO: 19472 - protein, 9 aa, Homo sapiens
  Table A; HLA-A*30:01; CTNNB1; G34V; 0
VIHSGATTT

SEQ ID NO: 19473 - protein, 9 aa, Homo sapiens
  Table A; HLA-B*08:01; CTNNB1; G34V; 1
VIHSGATTT

SEQ ID NO: 19474 - protein, 9 aa, Homo sapiens
  Table A; HLA-B*13:02; CTNNB1; G34V; 0
VIHSGATTT

SEQ ID NO: 19475 - protein, 9 aa, Homo sapiens
  Table A; HLA-B*15:01; CTNNB1; G34V; 1
VIHSGATTT

SEQ ID NO: 19476 - protein, 9 aa, Homo sapiens
  Table A; HLA-B*15:02; CTNNB1; G34V; 0
VIHSGATTT

SEQ ID NO: 19477 - protein, 9 aa, Homo sapiens
  Table A; HLA-B*46:01; CTNNB1; G34V; 0
VIHSGATTT

SEQ ID NO: 19478 - protein, 9 aa, Homo sapiens
  Table A; HLA-B*48:01; CTNNB1; G34V; 0
VIHSGATTT

SEQ ID NO: 19479 - protein, 9 aa, Homo sapiens
  Table A; HLA-C*08:03; CTNNB1; G34V; 0
VIHSGATTT

SEQ ID NO: 19480 - protein, 10 aa, Homo sapiens
  Table A; HLA-A*02:01; CTNNB1; G34V; 1
VIHSGATTTA

SEQ ID NO: 19481 - protein, 10 aa, Homo sapiens
  Table A; HLA-A*02:03; CTNNB1; G34V; 0
VIHSGATTTA

SEQ ID NO: 19482 - protein, 10 aa, Homo sapiens
  Table A; HLA-A*02:05; CTNNB1; G34V; 0
VIHSGATTTA

SEQ ID NO: 19483 - protein, 10 aa, Homo sapiens
  Table A; HLA-A*02:06; CTNNB1; G34V; 0
VIHSGATTTA

SEQ ID NO: 19484 - protein, 10 aa, Homo sapiens
  Table A; HLA-A*02:08; CTNNB1; G34V; 0
VIHSGATTTA

SEQ ID NO: 19485 - protein, 10 aa, Homo sapiens
  Table A; HLA-A*30:01; CTNNB1; G34V; 0
VIHSGATTTA

SEQ ID NO: 19486 - protein, 10 aa, Homo sapiens
  Table A; HLA-B*07:02; CTNNB1; G34V; 1
VIHSGATTTA

SEQ ID NO: 19487 - protein, 10 aa, Homo sapiens
  Table A; HLA-B*13:02; CTNNB1; G34V; 0
VIHSGATTTA

SEQ ID NO: 19488 - protein, 10 aa, Homo sapiens
  Table A; HLA-B*15:01; CTNNB1; G34V; 1
VIHSGATTTA

SEQ ID NO: 19489 - protein, 10 aa, Homo sapiens
  Table A; HLA-B*39:06; CTNNB1; G34V; 0
VIHSGATTTA

SEQ ID NO: 19490 - protein, 10 aa, Homo sapiens
  Table A; HLA-B*46:01; CTNNB1; G34V; 0
VIHSGATTTA

SEQ ID NO: 19491 - protein, 10 aa, Homo sapiens
  Table A; HLA-B*48:01; CTNNB1; G34V; 0
VIHSGATTTA

SEQ ID NO: 19492 - protein, 10 aa, Homo sapiens
  Table A; HLA-B*50:01; CTNNB1; G34V; 0
VIHSGATTTA

SEQ ID NO: 19493 - protein, 10 aa, Homo sapiens
  Table A; HLA-B*54:01; CTNNB1; G34V; 0
VIHSGATTTA

SEQ ID NO: 19494 - protein, 10 aa, Homo sapiens
  Table A; HLA-B*56:01; CTNNB1; G34V; 0
VIHSGATTTA

SEQ ID NO: 19495 - protein, 10 aa, Homo sapiens
  Table A; HLA-C*08:01; CTNNB1; G34V; 0
VIHSGATTTA

SEQ ID NO: 19496 - protein, 10 aa, Homo sapiens
  Table A; HLA-C*08:03; CTNNB1; G34V; 0
VIHSGATTTA

SEQ ID NO: 19497 - protein, 9 aa, Homo sapiens
  Table A; HLA-A*02:01; KEAP1; D422N; 1
VINGHIYAV

SEQ ID NO: 19498 - protein, 9 aa, Homo sapiens
  Table A; HLA-A*02:03; KEAP1; D422N; 0
VINGHIYAV

SEQ ID NO: 19499 - protein, 9 aa, Homo sapiens
  Table A; HLA-A*02:04; KEAP1; D422N; 0
VINGHIYAV

SEQ ID NO: 19500 - protein, 9 aa, Homo sapiens
  Table A; HLA-A*02:05; KEAP1; D422N; 0
VINGHIYAV

SEQ ID NO: 19501 - protein, 9 aa, Homo sapiens
  Table A; HLA-A*02:06; KEAP1; D422N; 0
VINGHIYAV

SEQ ID NO: 19502 - protein, 9 aa, Homo sapiens
  Table A; HLA-A*02:07; KEAP1; D422N; 0
VINGHIYAV

SEQ ID NO: 19503 - protein, 9 aa, Homo sapiens
  Table A; HLA-A*02:08; KEAP1; D422N; 0
VINGHIYAV

SEQ ID NO: 19504 - protein, 9 aa, Homo sapiens
  Table A; HLA-A*03:02; KEAP1; D422N; 0
VINGHIYAV

SEQ ID NO: 19505 - protein, 9 aa, Homo sapiens
  Table A; HLA-A*11:01; KEAP1; D422N; 0
VINGHIYAV

SEQ ID NO: 19506 - protein, 9 aa, Homo sapiens
  Table A; HLA-A*30:01; KEAP1; D422N; 0
VINGHIYAV

SEQ ID NO: 19507 - protein, 9 aa, Homo sapiens
  Table A; HLA-A*31:01; KEAP1; D422N; 0
VINGHIYAV

SEQ ID NO: 19508 - protein, 9 aa, Homo sapiens
  Table A; HLA-A*32:01; KEAP1; D422N; 0
VINGHIYAV

SEQ ID NO: 19509 - protein, 9 aa, Homo sapiens
  Table A; HLA-A*68:02; KEAP1; D422N; 0
VINGHIYAV

SEQ ID NO: 19510 - protein, 9 aa, Homo sapiens
  Table A; HLA-B*08:01; KEAP1; D422N; 1
VINGHIYAV

SEQ ID NO: 19511 - protein, 9 aa, Homo sapiens
  Table A; HLA-B*13:02; KEAP1; D422N; 0
VINGHIYAV

SEQ ID NO: 19512 - protein, 9 aa, Homo sapiens
  Table A; HLA-B*15:01; KEAP1; D422N; 0
VINGHIYAV

SEQ ID NO: 19513 - protein, 9 aa, Homo sapiens
  Table A; HLA-B*15:02; KEAP1; D422N; 0
VINGHIYAV

SEQ ID NO: 19514 - protein, 9 aa, Homo sapiens
  Table A; HLA-B*35:03; KEAP1; D422N; 0
VINGHIYAV

SEQ ID NO: 19515 - protein, 9 aa, Homo sapiens
  Table A; HLA-B*40:02; KEAP1; D422N; 0
VINGHIYAV

SEQ ID NO: 19516 - protein, 9 aa, Homo sapiens
  Table A; HLA-B*46:01; KEAP1; D422N; 0
VINGHIYAV

SEQ ID NO: 19517 - protein, 9 aa, Homo sapiens
  Table A; HLA-B*48:01; KEAP1; D422N; 0
VINGHIYAV

SEQ ID NO: 19518 - protein, 9 aa, Homo sapiens
  Table A; HLA-B*50:01; KEAP1; D422N; 0
VINGHIYAV

SEQ ID NO: 19519 - protein, 9 aa, Homo sapiens
  Table A; HLA-B*54:01; KEAP1; D422N; 0
VINGHIYAV

SEQ ID NO: 19520 - protein, 9 aa, Homo sapiens
  Table A; HLA-B*58:01; KEAP1; D422N; 0
VINGHIYAV

SEQ ID NO: 19521 - protein, 9 aa, Homo sapiens
  Table A; HLA-C*02:02; KEAP1; D422N; 0
VINGHIYAV

SEQ ID NO: 19522 - protein, 9 aa, Homo sapiens
  Table A; HLA-C*03:02; KEAP1; D422N; 0
VINGHIYAV

SEQ ID NO: 19523 - protein, 9 aa, Homo sapiens
  Table A; HLA-C*08:01; KEAP1; D422N; 0
VINGHIYAV

SEQ ID NO: 19524 - protein, 9 aa, Homo sapiens
  Table A; HLA-C*12:03; KEAP1; D422N; 0
VINGHIYAV

SEQ ID NO: 19525 - protein, 9 aa, Homo sapiens
  Table A; HLA-C*15:02; KEAP1; D422N; 0
VINGHIYAV

SEQ ID NO: 19526 - protein, 9 aa, Homo sapiens
  Table A; HLA-C*16:01; KEAP1; D422N; 0
VINGHIYAV

SEQ ID NO: 19527 - protein, 9 aa, Homo sapiens
  Table A; HLA-C*16:02; KEAP1; D422N; 0
VINGHIYAV

SEQ ID NO: 19528 - protein, 9 aa, Homo sapiens
  Table A; HLA-C*16:04; KEAP1; D422N; 0
VINGHIYAV

SEQ ID NO: 19529 - protein, 10 aa, Homo sapiens
  Table A; HLA-A*03:02; SMARCA4; G1232S; 0
VIQASMFDQK

SEQ ID NO: 19530 - protein, 10 aa, Homo sapiens
  Table A; HLA-A*11:01; SMARCA4; G1232S; 0
VIQASMFDQK

SEQ ID NO: 19531 - protein, 10 aa, Homo sapiens
  Table A; HLA-B*27:02; SMARCA4; G1232S; 0
VIQASMFDQK

SEQ ID NO: 19532 - protein, 9 aa, Homo sapiens
  Table A; HLA-A*02:01; CTNND1; A781T; 1
VITENLEAA

SEQ ID NO: 19533 - protein, 9 aa, Homo sapiens
  Table A; HLA-A*02:03; CTNND1; A781T; 0
VITENLEAA

SEQ ID NO: 19534 - protein, 9 aa, Homo sapiens
  Table A; HLA-A*02:05; CTNND1; A781T; 0
VITENLEAA

SEQ ID NO: 19535 - protein, 9 aa, Homo sapiens
  Table A; HLA-A*02:06; CTNND1; A781T; 0
VITENLEAA

SEQ ID NO: 19536 - protein, 9 aa, Homo sapiens
  Table A; HLA-A*02:08; CTNND1; A781T; 0
VITENLEAA

SEQ ID NO: 19537 - protein, 9 aa, Homo sapiens
  Table A; HLA-B*39:06; CTNND1; A781T; 0
VITENLEAA

SEQ ID NO: 19538 - protein, 9 aa, Homo sapiens
  Table A; HLA-B*50:01; CTNND1; A781T; 0
VITENLEAA

SEQ ID NO: 19539 - protein, 9 aa, Homo sapiens
  Table A; HLA-B*54:01; CTNND1; A781T; 0
VITENLEAA

SEQ ID NO: 19540 - protein, 9 aa, Homo sapiens
  Table A; HLA-B*55:02; CTNND1; A781T; 0
VITENLEAA

SEQ ID NO: 19541 - protein, 9 aa, Homo sapiens
  Table A; HLA-B*56:01; CTNND1; A781T; 0
VITENLEAA

SEQ ID NO: 19542 - protein, 9 aa, Homo sapiens
  Table A; HLA-C*08:01; CTNND1; A781T; 0
VITENLEAA

SEQ ID NO: 19543 - protein, 10 aa, Homo sapiens
  Table A; HLA-A*03:02; CTNND1; A781T; 0
VITENLEAAK

SEQ ID NO: 19544 - protein, 10 aa, Homo sapiens
  Table A; HLA-A*11:01; CTNND1; A781T; 0
VITENLEAAK

SEQ ID NO: 19545 - protein, 10 aa, Homo sapiens
  Table A; HLA-A*68:01; CTNND1; A781T; 0
VITENLEAAK

SEQ ID NO: 19546 - protein, 10 aa, Homo sapiens
  Table A; HLA-B*27:02; CTNND1; A781T; 0
VITENLEAAK

SEQ ID NO: 19547 - protein, 11 aa, Homo sapiens
  Table A; HLA-A*03:02; CTNND1; A781T; 0
VITENLEAAKK

SEQ ID NO: 19548 - protein, 11 aa, Homo sapiens
  Table A; HLA-A*11:01; CTNND1; A781T; 0
VITENLEAAKK

SEQ ID NO: 19549 - protein, 11 aa, Homo sapiens
  Table A; HLA-A*68:01; CTNND1; A781T; 0
VITENLEAAKK

SEQ ID NO: 19550 - protein, 11 aa, Homo sapiens
  Table A; HLA-B*27:02; CTNND1; A781T; 0
VITENLEAAKK

SEQ ID NO: 19551 - protein, 11 aa, Homo sapiens
  Table A; HLA-B*57:01; PIK3CA; E542V; 0
VITEQEKDFLW

SEQ ID NO: 19552 - protein, 11 aa, Homo sapiens
  Table A; HLA-B*15:03; IDH1; R132G; 0
VKPIIIGGHAY

SEQ ID NO: 19553 - protein, 8 aa, Homo sapiens
  Table A; HLA-B*48:01; IDH1; R132L; 0
VKPIIIGL

SEQ ID NO: 19554 - protein, 9 aa, Homo sapiens
  Table A; HLA-B*48:01; IDH1; R132S; 0
VKPIIIGSH

SEQ ID NO: 19555 - protein, 9 aa, Homo sapiens
  Table A; HLA-B*15:03; RAC1; A159V; 0
VKYLECSVL

SEQ ID NO: 19556 - protein, 9 aa, Homo sapiens
  Table A; HLA-B*48:01; RAC1; A159V; 0
VKYLECSVL

SEQ ID NO: 19557 - protein, 9 aa, Homo sapiens
  Table A; HLA-A*30:02; MAP2K1; P124S; 0
VLHECNSSY

SEQ ID NO: 19558 - protein, 9 aa, Homo sapiens
  Table A; HLA-B*15:01; MAP2K1; P124S; 1
VLHECNSSY

SEQ ID NO: 19559 - protein, 9 aa, Homo sapiens
  Table A; HLA-B*15:02; MAP2K1; P124S; 0
VLHECNSSY

SEQ ID NO: 19560 - protein, 9 aa, Homo sapiens
  Table A; HLA-B*15:03; MAP2K1; P124S; 0
VLHECNSSY

SEQ ID NO: 19561 - protein, 9 aa, Homo sapiens
  Table A; HLA-B*46:01; MAP2K1; P124S; 0
VLHECNSSY

SEQ ID NO: 19562 - protein, 9 aa, Homo sapiens
  Table A; HLA-C*08:01; MAP2K1; P124S; 0
VLHECNSSY

SEQ ID NO: 19563 - protein, 9 aa, Homo sapiens
  Table A; HLA-A*02:04; KDR; S1100F; 0
VLLWEIFFL

SEQ ID NO: 19564 - protein, 9 aa, Homo sapiens
  Table A; HLA-A*02:07; KDR; S1100F; 0
VLLWEIFFL

SEQ ID NO: 19565 - protein, 9 aa, Homo sapiens
  Table A; HLA-A*02:01; KEAP1; R470C; 1
VLNCLLYAV

SEQ ID NO: 19566 - protein, 9 aa, Homo sapiens
  Table A; HLA-A*02:04; KEAP1; R470C; 0
VLNCLLYAV

SEQ ID NO: 19567 - protein, 9 aa, Homo sapiens
  Table A; HLA-A*02:03; CREBBP; P2094L; 0
VLNILKSNL

SEQ ID NO: 19568 - protein, 9 aa, Homo sapiens
  Table A; HLA-A*02:04; CREBBP; P2094L; 0
VLNILKSNL

SEQ ID NO: 19569 - protein, 11 aa, Homo sapiens
  Table A; HLA-A*02:04; CRNKL1; S128F; 0
VLQVPLPVPRF

SEQ ID NO: 19570 - protein, 8 aa, Homo sapiens
  Table A; HLA-A*03:01; RAC1; A159V; 1
VLTQRGLK

SEQ ID NO: 19571 - protein, 8 aa, Homo sapiens
  Table A; HLA-A*03:02; RAC1; A159V; 0
VLTQRGLK

SEQ ID NO: 19572 - protein, 8 aa, Homo sapiens
  Table A; HLA-A*11:01; RAC1; A159V; 0
VLTQRGLK

SEQ ID NO: 19573 - protein, 9 aa, Homo sapiens
  Table A; HLA-A*02:03; RAC1; A159V; 0
VLTQRGLKT

SEQ ID NO: 19574 - protein, 10 aa, Homo sapiens
  Table A; HLA-A*02:01; RAC1; A159V; 1
VLTQRGLKTV

SEQ ID NO: 19575 - protein, 10 aa, Homo sapiens
  Table A; HLA-A*02:03; RAC1; A159V; 0
VLTQRGLKTV

SEQ ID NO: 19576 - protein, 10 aa, Homo sapiens
  Table A; HLA-A*02:01; MTOR; A2056V; 1
VMMERGPQTL

SEQ ID NO: 19577 - protein, 10 aa, Homo sapiens
  Table A; HLA-A*02:03; MTOR; A2056V; 0
VMMERGPQTL

SEQ ID NO: 19578 - protein, 10 aa, Homo sapiens
  Table A; HLA-A*02:04; MTOR; A2056V; 0
VMMERGPQTL

SEQ ID NO: 19579 - protein, 10 aa, Homo sapiens
  Table A; HLA-A*24:02; MTOR; A2056V; 1
VMMERGPQTL

SEQ ID NO: 19580 - protein, 10 aa, Homo sapiens
  Table A; HLA-B*08:01; MTOR; A2056V; 1
VMMERGPQTL

SEQ ID NO: 19581 - protein, 10 aa, Homo sapiens
  Table A; HLA-B*48:01; MTOR; A2056V; 0
VMMERGPQTL

SEQ ID NO: 19582 - protein, 11 aa, Homo sapiens
  Table A; HLA-A*03:01; MTOR; A2056V; 1
VMMERGPQTLK

SEQ ID NO: 19583 - protein, 11 aa, Homo sapiens
  Table A; HLA-A*03:02; MTOR; A2056V; 0
VMMERGPQTLK

SEQ ID NO: 19584 - protein, 8 aa, Homo sapiens
  Table A; HLA-B*08:01; MTOR; E1799K; 1
VMNFKAVL

SEQ ID NO: 19585 - protein, 9 aa, Homo sapiens
  Table A; HLA-A*03:01; MTOR; E1799K; 1
VMNFKAVLH

SEQ ID NO: 19586 - protein, 9 aa, Homo sapiens
  Table A; HLA-A*03:02; MTOR; E1799K; 0
VMNFKAVLH

SEQ ID NO: 19587 - protein, 10 aa, Homo sapiens
  Table A; HLA-A*29:02; MTOR; E1799K; 1
VMNFKAVLHY

SEQ ID NO: 19588 - protein, 8 aa, Homo sapiens
  Table A; HLA-B*15:01; RGPD3; N756D; 1
VMQELEDY

SEQ ID NO: 19589 - protein, 8 aa, Homo sapiens
  Table A; HLA-B*46:01; RGPD3; N756D; 0
VMQELEDY

SEQ ID NO: 19590 - protein, 8 aa, Homo sapiens
  Table A; HLA-B*57:01; ROBO2; D1014N; 0
VNLPDPQW

SEQ ID NO: 19591 - protein, 8 aa, Homo sapiens
  Table A; HLA-A*31:01; PIK3CA; C378R; 0
VNTQRVPR

SEQ ID NO: 19592 - protein, 8 aa, Homo sapiens
  Table A; HLA-A*33:01; PIK3CA; C378R; 0
VNTQRVPR

SEQ ID NO: 19593 - protein, 8 aa, Homo sapiens
  Table A; HLA-A*33:03; PIK3CA; C378R; 0
VNTQRVPR

SEQ ID NO: 19594 - protein, 8 aa, Homo sapiens
  Table A; HLA-B*51:01; TP53; Y220C; 1
VPCEPPEV

SEQ ID NO: 19595 - protein, 8 aa, Homo sapiens
  Table A; HLA-B*54:01; TP53; Y220C; 0
VPCEPPEV

SEQ ID NO: 19596 - protein, 9 aa, Homo sapiens
  Table A; HLA-B*35:03; PIK3CA; E453Q; 0
VPHGLQDLL

SEQ ID NO: 19597 - protein, 8 aa, Homo sapiens
  Table A; HLA-A*23:01; CRNKL1; S128F; 0
VPLPVPRF

SEQ ID NO: 19598 - protein, 8 aa, Homo sapiens
  Table A; HLA-B*51:01; CRNKL1; S128F; 1
VPLPVPRF

SEQ ID NO: 19599 - protein, 8 aa, Homo sapiens
  Table A; HLA-B*54:01; CRNKL1; S128F; 0
VPLPVPRF

SEQ ID NO: 19600 - protein, 8 aa, Homo sapiens
  Table A; HLA-B*55:01; CRNKL1; S128F; 0
VPLPVPRF

SEQ ID NO: 19601 - protein, 8 aa, Homo sapiens
  Table A; HLA-B*07:02; ACSL3; R232Q; 1
VPRLQHII

SEQ ID NO: 19602 - protein, 8 aa, Homo sapiens
  Table A; HLA-B*51:01; ACSL3; R232Q; 1
VPRLQHII

SEQ ID NO: 19603 - protein, 8 aa, Homo sapiens
  Table A; HLA-B*54:01; ACSL3; R232Q; 0
VPRLQHII

SEQ ID NO: 19604 - protein, 10 aa, Homo sapiens
  Table A; HLA-B*07:02; ACSL3; R232Q; 1
VPRLQHIITV

SEQ ID NO: 19605 - protein, 10 aa, Homo sapiens
  Table A; HLA-B*51:01; ACSL3; R232Q; 1
VPRLQHIITV

SEQ ID NO: 19606 - protein, 10 aa, Homo sapiens
  Table A; HLA-B*54:01; ACSL3; R232Q; 0
VPRLQHIITV

SEQ ID NO: 19607 - protein, 10 aa, Homo sapiens
  Table A; HLA-B*55:01; ACSL3; R232Q; 0
VPRLQHIITV

SEQ ID NO: 19608 - protein, 10 aa, Homo sapiens
  Table A; HLA-B*55:02; ACSL3; R232Q; 0
VPRLQHIITV

SEQ ID NO: 19609 - protein, 10 aa, Homo sapiens
  Table A; HLA-B*56:01; ACSL3; R232Q; 0
VPRLQHIITV

SEQ ID NO: 19610 - protein, 8 aa, Homo sapiens
  Table A; HLA-B*54:01; RHOA; Y42C; 0
VPTVFENC

SEQ ID NO: 19611 - protein, 8 aa, Homo sapiens
  Table A; HLA-B*55:02; RHOA; Y42C; 0
VPTVFENC

SEQ ID NO: 19612 - protein, 8 aa, Homo sapiens
  Table A; HLA-B*56:01; RHOA; Y42C; 0
VPTVFENC

SEQ ID NO: 19613 - protein, 9 aa, Homo sapiens
  Table A; HLA-A*68:02; RHOA; Y42C; 0
VPTVFENCV

SEQ ID NO: 19614 - protein, 9 aa, Homo sapiens
  Table A; HLA-B*07:02; RHOA; Y42C; 1
VPTVFENCV

SEQ ID NO: 19615 - protein, 9 aa, Homo sapiens
  Table A; HLA-B*35:03; RHOA; Y42C; 0
VPTVFENCV

SEQ ID NO: 19616 - protein, 9 aa, Homo sapiens
  Table A; HLA-B*39:06; RHOA; Y42C; 0
VPTVFENCV

SEQ ID NO: 19617 - protein, 9 aa, Homo sapiens
  Table A; HLA-B*51:01; RHOA; Y42C; 0
VPTVFENCV

SEQ ID NO: 19618 - protein, 9 aa, Homo sapiens
  Table A; HLA-B*54:01; RHOA; Y42C; 0
VPTVFENCV

SEQ ID NO: 19619 - protein, 9 aa, Homo sapiens
  Table A; HLA-B*55:01; RHOA; Y42C; 0
VPTVFENCV

SEQ ID NO: 19620 - protein, 9 aa, Homo sapiens
  Table A; HLA-B*55:02; RHOA; Y42C; 0
VPTVFENCV

SEQ ID NO: 19621 - protein, 9 aa, Homo sapiens
  Table A; HLA-B*56:01; RHOA; Y42C; 0
VPTVFENCV

SEQ ID NO: 19622 - protein, 10 aa, Homo sapiens
  Table A; HLA-B*54:01; RHOA; Y42C; 0
VPTVFENCVA

SEQ ID NO: 19623 - protein, 10 aa, Homo sapiens
  Table A; HLA-B*55:02; RHOA; Y42C; 0
VPTVFENCVA

SEQ ID NO: 19624 - protein, 10 aa, Homo sapiens
  Table A; HLA-B*56:01; RHOA; Y42C; 0
VPTVFENCVA

SEQ ID NO: 19625 - protein, 8 aa, Homo sapiens
  Table A; HLA-B*13:02; SPOP; F133V; 0
VQGKDWGV

SEQ ID NO: 19626 - protein, 9 aa, Homo sapiens
  Table A; HLA-A*30:04; A1CF; E34K; 0
VQKNGQRKY

SEQ ID NO: 19627 - protein, 9 aa, Homo sapiens
  Table A; HLA-B*15:01; A1CF; E34K; 1
VQKNGQRKY

SEQ ID NO: 19628 - protein, 9 aa, Homo sapiens
  Table A; HLA-B*15:03; A1CF; E34K; 0
VQKNGQRKY

SEQ ID NO: 19629 - protein, 9 aa, Homo sapiens
  Table A; HLA-C*02:02; A1CF; E34K; 1
VQKNGQRKY

SEQ ID NO: 19630 - protein, 8 aa, Homo sapiens
  Table A; HLA-B*13:02; PPP2R1A; R28C; 0
VQLCLNSI

SEQ ID NO: 19631 - protein, 11 aa, Homo sapiens
  Table A; HLA-A*03:01; A1CF; E34K; 1
VQRTGYSLVQK

SEQ ID NO: 19632 - protein, 11 aa, Homo sapiens
  Table A; HLA-A*11:01; A1CF; E34K; 1
VQRTGYSLVQK

SEQ ID NO: 19633 - protein, 11 aa, Homo sapiens
  Table A; HLA-A*31:01; A1CF; E34K; 0
VQRTGYSLVQK

SEQ ID NO: 19634 - protein, 9 aa, Homo sapiens
  Table A; HLA-B*13:02; ACVR1; R206H; 0
VQRTVAHQI

SEQ ID NO: 19635 - protein, 8 aa, Homo sapiens
  Table A; HLA-B*13:02; ARHGEF12; R113Q; 0
VQTGDQII

SEQ ID NO: 19636 - protein, 8 aa, Homo sapiens
  Table A; HLA-B*48:01; ARHGEF12; R113Q; 0
VQTGDQII

SEQ ID NO: 19637 - protein, 9 aa, Homo sapiens
  Table A; HLA-A*11:01; ARHGEF12; R113Q; 0
VQTGDQIIK

SEQ ID NO: 19638 - protein, 10 aa, Homo sapiens
  Table A; HLA-A*02:04; ARHGEF12; R113Q; 0
VQTGDQIIKV

SEQ ID NO: 19639 - protein, 10 aa, Homo sapiens
  Table A; HLA-A*02:05; ARHGEF12; R113Q; 0
VQTGDQIIKV

SEQ ID NO: 19640 - protein, 10 aa, Homo sapiens
  Table A; HLA-A*02:06; ARHGEF12; R113Q; 0
VQTGDQIIKV

SEQ ID NO: 19641 - protein, 10 aa, Homo sapiens
  Table A; HLA-B*13:02; ARHGEF12; R113Q; 0
VQTGDQIIKV

SEQ ID NO: 19642 - protein, 9 aa, Homo sapiens
  Table A; HLA-A*02:01; CNTNAP2; R483Q; 1
VQTNSPLQV

SEQ ID NO: 19643 - protein, 9 aa, Homo sapiens
  Table A; HLA-A*02:03; CNTNAP2; R483Q; 0
VQTNSPLQV

SEQ ID NO: 19644 - protein, 9 aa, Homo sapiens
  Table A; HLA-A*02:04; CNTNAP2; R483Q; 0
VQTNSPLQV

SEQ ID NO: 19645 - protein, 9 aa, Homo sapiens
  Table A; HLA-A*02:05; CNTNAP2; R483Q; 0
VQTNSPLQV

SEQ ID NO: 19646 - protein, 9 aa, Homo sapiens
  Table A; HLA-A*02:06; CNTNAP2; R483Q; 0
VQTNSPLQV

SEQ ID NO: 19647 - protein, 9 aa, Homo sapiens
  Table A; HLA-A*02:08; CNTNAP2; R483Q; 0
VQTNSPLQV

SEQ ID NO: 19648 - protein, 9 aa, Homo sapiens
  Table A; HLA-B*13:02; CNTNAP2; R483Q; 0
VQTNSPLQV

SEQ ID NO: 19649 - protein, 9 aa, Homo sapiens
  Table A; HLA-C*15:02; CNTNAP2; R483Q; 0
VQTNSPLQV

SEQ ID NO: 19650 - protein, 10 aa, Homo sapiens
  Table A; HLA-A*03:01; CNTNAP2; R483Q; 1
VQTNSPLQVK

SEQ ID NO: 19651 - protein, 10 aa, Homo sapiens
  Table A; HLA-A*03:02; CNTNAP2; R483Q; 0
VQTNSPLQVK

SEQ ID NO: 19652 - protein, 10 aa, Homo sapiens
  Table A; HLA-A*11:01; CNTNAP2; R483Q; 1
VQTNSPLQVK

SEQ ID NO: 19653 - protein, 10 aa, Homo sapiens
  Table A; HLA-B*27:02; CNTNAP2; R483Q; 0
VQTNSPLQVK

SEQ ID NO: 19654 - protein, 9 aa, Homo sapiens
  Table A; HLA-C*06:02; CDKN2A; P114L; 1
VRDAWGRLL

SEQ ID NO: 19655 - protein, 10 aa, Homo sapiens
  Table A; HLA-B*27:02; PTK6; H126P; 0
VRDTQAVRPY

SEQ ID NO: 19656 - protein, 8 aa, Homo sapiens
  Table A; HLA-B*15:01; HIST1H3B; E74K; 0
VRKIAQDF

SEQ ID NO: 19657 - protein, 8 aa, Homo sapiens
  Table A; HLA-B*15:03; HIST1H3B; E74K; 0
VRKIAQDF

SEQ ID NO: 19658 - protein, 9 aa, Homo sapiens
  Table A; HLA-A*68:02; TP53; G266V; 0
VRNSFEVRV

SEQ ID NO: 19659 - protein, 9 aa, Homo sapiens
  Table A; HLA-B*27:05; TP53; G266V; 0
VRNSFEVRV

SEQ ID NO: 19660 - protein, 9 aa, Homo sapiens
  Table A; HLA-C*06:02; TP53; G266V; 1
VRNSFEVRV

SEQ ID NO: 19661 - protein, 9 aa, Homo sapiens
  Table A; HLA-B*27:05; PPP2R1A; R183W; 0
VRWAAASKL

SEQ ID NO: 19662 - protein, 9 aa, Homo sapiens
  Table A; HLA-C*06:02; PPP2R1A; R183W; 1
VRWAAASKL

SEQ ID NO: 19663 - protein, 8 aa, Homo sapiens
  Table A; HLA-A*11:01; BRAF; G466V; 1
VSFGTVYK

SEQ ID NO: 19664 - protein, 11 aa, Homo sapiens
  Table A; HLA-B*57:01; BRAF; G466V; 0
VSFGTVYKGKW

SEQ ID NO: 19665 - protein, 8 aa, Homo sapiens
  Table A; HLA-B*57:01; NFE2L2; R34G; 0
VSGEVFDF

SEQ ID NO: 19666 - protein, 8 aa, Homo sapiens
  Table A; HLA-B*58:01; NFE2L2; R34G; 0
VSGEVFDF

SEQ ID NO: 19667 - protein, 11 aa, Homo sapiens
  Table A; HLA-A*31:01; NFE2L2; R34G; 0
VSGEVFDFSQR

SEQ ID NO: 19668 - protein, 8 aa, Homo sapiens
  Table A; HLA-B*48:01; CTNNB1; D32V; 0
VSGIHSGA

SEQ ID NO: 19669 - protein, 8 aa, Homo sapiens
  Table A; HLA-C*08:03; CTNNB1; D32V; 0
VSGIHSGA

SEQ ID NO: 19670 - protein, 9 aa, Homo sapiens
  Table A; HLA-B*08:01; CTNNB1; D32V; 1
VSGIHSGAT

SEQ ID NO: 19671 - protein, 9 aa, Homo sapiens
  Table A; HLA-B*48:01; CTNNB1; D32V; 0
VSGIHSGAT

SEQ ID NO: 19672 - protein, 9 aa, Homo sapiens
  Table A; HLA-C*08:03; CTNNB1; D32V; 0
VSGIHSGAT

SEQ ID NO: 19673 - protein, 9 aa, Homo sapiens
  Table A; HLA-A*02:04; AR; F814V; 0
VSIIPVDGL

SEQ ID NO: 19674 - protein, 9 aa, Homo sapiens
  Table A; HLA-A*02:05; AR; F814V; 0
VSIIPVDGL

SEQ ID NO: 19675 - protein, 9 aa, Homo sapiens
  Table A; HLA-A*02:06; AR; F814V; 0
VSIIPVDGL

SEQ ID NO: 19676 - protein, 9 aa, Homo sapiens
  Table A; HLA-A*02:08; AR; F814V; 0
VSIIPVDGL

SEQ ID NO: 19677 - protein, 9 aa, Homo sapiens
  Table A; HLA-A*30:01; AR; F814V; 0
VSIIPVDGL

SEQ ID NO: 19678 - protein, 9 aa, Homo sapiens
  Table A; HLA-B*15:01; AR; F814V; 1
VSIIPVDGL

SEQ ID NO: 19679 - protein, 9 aa, Homo sapiens
  Table A; HLA-B*15:02; AR; F814V; 0
VSIIPVDGL

SEQ ID NO: 19680 - protein, 9 aa, Homo sapiens
  Table A; HLA-B*40:01; AR; F814V; 1
VSIIPVDGL

SEQ ID NO: 19681 - protein, 9 aa, Homo sapiens
  Table A; HLA-B*40:02; AR; F814V; 0
VSIIPVDGL

SEQ ID NO: 19682 - protein, 9 aa, Homo sapiens
  Table A; HLA-B*44:05; AR; F814V; 0
VSIIPVDGL

SEQ ID NO: 19683 - protein, 9 aa, Homo sapiens
  Table A; HLA-B*46:01; AR; F814V; 0
VSIIPVDGL

SEQ ID NO: 19684 - protein, 9 aa, Homo sapiens
  Table A; HLA-B*48:01; AR; F814V; 0
VSIIPVDGL

SEQ ID NO: 19685 - protein, 9 aa, Homo sapiens
  Table A; HLA-B*57:01; AR; F814V; 0
VSIIPVDGL

SEQ ID NO: 19686 - protein, 9 aa, Homo sapiens
  Table A; HLA-B*58:01; AR; F814V; 0
VSIIPVDGL

SEQ ID NO: 19687 - protein, 9 aa, Homo sapiens
  Table A; HLA-C*03:03; AR; F814V; 1
VSIIPVDGL

SEQ ID NO: 19688 - protein, 9 aa, Homo sapiens
  Table A; HLA-C*03:04; AR; F814V; 1
VSIIPVDGL

SEQ ID NO: 19689 - protein, 9 aa, Homo sapiens
  Table A; HLA-C*08:01; AR; F814V; 0
VSIIPVDGL

SEQ ID NO: 19690 - protein, 9 aa, Homo sapiens
  Table A; HLA-C*08:03; AR; F814V; 0
VSIIPVDGL

SEQ ID NO: 19691 - protein, 9 aa, Homo sapiens
  Table A; HLA-C*15:02; AR; F814V; 0
VSIIPVDGL

SEQ ID NO: 19692 - protein, 9 aa, Homo sapiens
  Table A; HLA-C*17:01; AR; F814V; 0
VSIIPVDGL

SEQ ID NO: 19693 - protein, 10 aa, Homo sapiens
  Table A; HLA-A*11:01; AR; F814V; 1
VSIIPVDGLK

SEQ ID NO: 19694 - protein, 9 aa, Homo sapiens
  Table A; HLA-B*15:01; BCOR; N1425S; 1
VSKNAGETL

SEQ ID NO: 19695 - protein, 9 aa, Homo sapiens
  Table A; HLA-B*46:01; BCOR; N1425S; 0
VSKNAGETL

SEQ ID NO: 19696 - protein, 9 aa, Homo sapiens
  Table A; HLA-B*58:01; BCOR; N1425S; 0
VSKNAGETL

SEQ ID NO: 19697 - protein, 9 aa, Homo sapiens
  Table A; HLA-C*03:03; BCOR; N1425S; 1
VSKNAGETL

SEQ ID NO: 19698 - protein, 9 aa, Homo sapiens
  Table A; HLA-C*03:04; BCOR; N1425S; 1
VSKNAGETL

SEQ ID NO: 19699 - protein, 9 aa, Homo sapiens
  Table A; HLA-C*08:01; BCOR; N1425S; 0
VSKNAGETL

SEQ ID NO: 19700 - protein, 11 aa, Homo sapiens
  Table A; HLA-A*31:01; NFE2L2; R34Q; 0
VSQEVFDFSQR

SEQ ID NO: 19701 - protein, 11 aa, Homo sapiens
  Table A; HLA-A*68:01; NFE2L2; R34Q; 0
VSQEVFDFSQR

SEQ ID NO: 19702 - protein, 10 aa, Homo sapiens
  Table A; HLA-B*57:01; DCC; R446H; 0
VSSRFVHLSW

SEQ ID NO: 19703 - protein, 8 aa, Homo sapiens
  Table A; HLA-C*16:02; CHST11; A159T; 0
VSTNLKTL

SEQ ID NO: 19704 - protein, 11 aa, Homo sapiens
  Table A; HLA-A*30:02; CHST11; A159T; 0
VSTNLKTLNQY

SEQ ID NO: 19705 - protein, 9 aa, Homo sapiens
  Table A; HLA-C*03:03; TP53; S127F; 0
VTCTYFPAL

SEQ ID NO: 19706 - protein, 9 aa, Homo sapiens
  Table A; HLA-C*03:04; TP53; S127F; 1
VTCTYFPAL

SEQ ID NO: 19707 - protein, 9 aa, Homo sapiens
  Table A; HLA-B*58:01; TP53; L130F; 0
VTCTYSPAF

SEQ ID NO: 19708 - protein, 11 aa, Homo sapiens
  Table A; HLA-A*33:03; TP53; K132R; 0
VTCTYSPALNR

SEQ ID NO: 19709 - protein, 9 aa, Homo sapiens
  Table A; HLA-A*29:02; PTEN; S170N; 0
VTIPNQRRY

SEQ ID NO: 19710 - protein, 9 aa, Homo sapiens
  Table A; HLA-A*30:04; PTEN; S170N; 0
VTIPNQRRY

SEQ ID NO: 19711 - protein, 9 aa, Homo sapiens
  Table A; HLA-B*15:01; PTEN; S170N; 0
VTIPNQRRY

SEQ ID NO: 19712 - protein, 9 aa, Homo sapiens
  Table A; HLA-B*57:01; PTEN; S170N; 0
VTIPNQRRY

SEQ ID NO: 19713 - protein, 9 aa, Homo sapiens
  Table A; HLA-B*58:01; PTEN; S170N; 0
VTIPNQRRY

SEQ ID NO: 19714 - protein, 9 aa, Homo sapiens
  Table A; HLA-C*16:01; PTEN; S170N; 0
VTIPNQRRY

SEQ ID NO: 19715 - protein, 9 aa, Homo sapiens
  Table A; HLA-A*30:02; PTEN; R173C; 0
VTIPSQRCY

SEQ ID NO: 19716 - protein, 9 aa, Homo sapiens
  Table A; HLA-A*30:04; PTEN; R173C; 0
VTIPSQRCY

SEQ ID NO: 19717 - protein, 9 aa, Homo sapiens
  Table A; HLA-A*32:01; PTEN; R173C; 0
VTIPSQRCY

SEQ ID NO: 19718 - protein, 9 aa, Homo sapiens
  Table A; HLA-B*15:01; PTEN; R173C; 1
VTIPSQRCY

SEQ ID NO: 19719 - protein, 9 aa, Homo sapiens
  Table A; HLA-B*57:01; PTEN; R173C; 0
VTIPSQRCY

SEQ ID NO: 19720 - protein, 9 aa, Homo sapiens
  Table A; HLA-B*58:01; PTEN; R173C; 0
VTIPSQRCY

SEQ ID NO: 19721 - protein, 9 aa, Homo sapiens
  Table A; HLA-C*02:02; PTEN; R173C; 0
VTIPSQRCY

SEQ ID NO: 19722 - protein, 9 aa, Homo sapiens
  Table A; HLA-C*12:03; PTEN; R173C; 1
VTIPSQRCY

SEQ ID NO: 19723 - protein, 9 aa, Homo sapiens
  Table A; HLA-C*16:01; PTEN; R173C; 0
VTIPSQRCY

SEQ ID NO: 19724 - protein, 9 aa, Homo sapiens
  Table A; HLA-A*02:01; PIK3CA; R38C; 1
VTLECLCEA

SEQ ID NO: 19725 - protein, 9 aa, Homo sapiens
  Table A; HLA-A*02:01; PIK3CA; R38H; 1
VTLECLHEA

SEQ ID NO: 19726 - protein, 9 aa, Homo sapiens
  Table A; HLA-A*02:05; PIK3CA; R38H; 0
VTLECLHEA

SEQ ID NO: 19727 - protein, 9 aa, Homo sapiens
  Table A; HLA-A*02:06; PIK3CA; R38H; 0
VTLECLHEA

SEQ ID NO: 19728 - protein, 9 aa, Homo sapiens
  Table A; HLA-B*50:01; PIK3CA; R38H; 0
VTLECLHEA

SEQ ID NO: 19729 - protein, 10 aa, Homo sapiens
  Table A; HLA-B*15:01; PIK3CA; E81K; 0
VTQEAEREKF

SEQ ID NO: 19730 - protein, 10 aa, Homo sapiens
  Table A; HLA-B*57:01; PIK3CA; E81K; 0
VTQEAEREKF

SEQ ID NO: 19731 - protein, 10 aa, Homo sapiens
  Table A; HLA-B*58:01; PIK3CA; E81K; 0
VTQEAEREKF

SEQ ID NO: 19732 - protein, 9 aa, Homo sapiens
  Table A; HLA-A*02:08; PCBP1; L100Q; 0
VTQRLVVPA

SEQ ID NO: 19733 - protein, 9 aa, Homo sapiens
  Table A; HLA-A*68:02; PCBP1; L100Q; 0
VTQRLVVPA

SEQ ID NO: 19734 - protein, 9 aa, Homo sapiens
  Table A; HLA-B*54:01; PCBP1; L100Q; 0
VTQRLVVPA

SEQ ID NO: 19735 - protein, 9 aa, Homo sapiens
  Table A; HLA-A*03:01; KRAS; G12A; 1
VVGAAGVGK

SEQ ID NO: 19736 - protein, 9 aa, Homo sapiens
  Table A; HLA-A*03:02; KRAS; G12A; 0
VVGAAGVGK

SEQ ID NO: 19737 - protein, 9 aa, Homo sapiens
  Table A; HLA-A*11:01; KRAS; G12A; 1
VVGAAGVGK

SEQ ID NO: 19738 - protein, 9 aa, Homo sapiens
  Table A; HLA-A*68:01; KRAS; G12A; 1
VVGAAGVGK

SEQ ID NO: 19739 - protein, 9 aa, Homo sapiens
  Table A; HLA-B*27:02; KRAS; G12A; 0
VVGAAGVGK

SEQ ID NO: 19740 - protein, 10 aa, Homo sapiens
  Table A; HLA-C*08:03; KRAS; G12A; 0
VVGAAGVGKS

SEQ ID NO: 19741 - protein, 9 aa, Homo sapiens
  Table A; HLA-A*03:01; KRAS; G12C; 1
VVGACGVGK

SEQ ID NO: 19742 - protein, 9 aa, Homo sapiens
  Table A; HLA-A*03:02; KRAS; G12C; 0
VVGACGVGK

SEQ ID NO: 19743 - protein, 9 aa, Homo sapiens
  Table A; HLA-A*11:01; KRAS; G12C; 1
VVGACGVGK

SEQ ID NO: 19744 - protein, 9 aa, Homo sapiens
  Table A; HLA-A*03:01; NRAS; G12C; 1
VVGACGVGK

SEQ ID NO: 19745 - protein, 9 aa, Homo sapiens
  Table A; HLA-A*03:02; NRAS; G12C; 0
VVGACGVGK

SEQ ID NO: 19746 - protein, 9 aa, Homo sapiens
  Table A; HLA-A*11:01; NRAS; G12C; 0
VVGACGVGK

SEQ ID NO: 19747 - protein, 9 aa, Homo sapiens
  Table A; HLA-A*03:01; KRAS; G12D; 1
VVGADGVGK

SEQ ID NO: 19748 - protein, 9 aa, Homo sapiens
  Table A; HLA-A*03:02; KRAS; G12D; 1
VVGADGVGK

SEQ ID NO: 19749 - protein, 9 aa, Homo sapiens
  Table A; HLA-A*11:01; KRAS; G12D; 1
VVGADGVGK

SEQ ID NO: 19750 - protein, 9 aa, Homo sapiens
  Table A; HLA-A*03:01; NRAS; G12D; 1
VVGADGVGK

SEQ ID NO: 19751 - protein, 9 aa, Homo sapiens
  Table A; HLA-A*03:02; NRAS; G12D; 0
VVGADGVGK

SEQ ID NO: 19752 - protein, 9 aa, Homo sapiens
  Table A; HLA-A*11:01; NRAS; G12D; 1
VVGADGVGK

SEQ ID NO: 19753 - protein, 10 aa, Homo sapiens
  Table A; HLA-C*08:03; KRAS; G12D; 0
VVGADGVGKS

SEQ ID NO: 19754 - protein, 10 aa, Homo sapiens
  Table A; HLA-C*08:03; NRAS; G12D; 0
VVGADGVGKS

SEQ ID NO: 19755 - protein, 9 aa, Homo sapiens
  Table A; HLA-A*03:01; KRAS; G13C; 1
VVGAGCVGK

SEQ ID NO: 19756 - protein, 9 aa, Homo sapiens
  Table A; HLA-A*03:02; KRAS; G13C; 0
VVGAGCVGK

SEQ ID NO: 19757 - protein, 9 aa, Homo sapiens
  Table A; HLA-A*11:01; KRAS; G13C; 1
VVGAGCVGK

SEQ ID NO: 19758 - protein, 9 aa, Homo sapiens
  Table A; HLA-A*03:01; KRAS; G13D; 1
VVGAGDVGK

SEQ ID NO: 19759 - protein, 9 aa, Homo sapiens
  Table A; HLA-A*03:02; KRAS; G13D; 0
VVGAGDVGK

SEQ ID NO: 19760 - protein, 9 aa, Homo sapiens
  Table A; HLA-A*11:01; KRAS; G13D; 1
VVGAGDVGK

SEQ ID NO: 19761 - protein, 9 aa, Homo sapiens
  Table A; HLA-A*68:01; KRAS; G13D; 1
VVGAGDVGK

SEQ ID NO: 19762 - protein, 10 aa, Homo sapiens
  Table A; HLA-C*08:03; KRAS; G13D; 0
VVGAGDVGKS

SEQ ID NO: 19763 - protein, 9 aa, Homo sapiens
  Table A; HLA-A*03:01; NRAS; G13R; 1
VVGAGRVGK

SEQ ID NO: 19764 - protein, 9 aa, Homo sapiens
  Table A; HLA-A*03:02; NRAS; G13R; 0
VVGAGRVGK

SEQ ID NO: 19765 - protein, 9 aa, Homo sapiens
  Table A; HLA-A*11:01; NRAS; G13R; 0
VVGAGRVGK

SEQ ID NO: 19766 - protein, 9 aa, Homo sapiens
  Table A; HLA-A*68:01; NRAS; G13R; 0
VVGAGRVGK

SEQ ID NO: 19767 - protein, 9 aa, Homo sapiens
  Table A; HLA-A*03:01; KRAS; G12R; 1
VVGARGVGK

SEQ ID NO: 19768 - protein, 9 aa, Homo sapiens
  Table A; HLA-A*03:02; KRAS; G12R; 0
VVGARGVGK

SEQ ID NO: 19769 - protein, 9 aa, Homo sapiens
  Table A; HLA-A*11:01; KRAS; G12R; 1
VVGARGVGK

SEQ ID NO: 19770 - protein, 9 aa, Homo sapiens
  Table A; HLA-A*03:01; KRAS; G12S; 1
VVGASGVGK

SEQ ID NO: 19771 - protein, 9 aa, Homo sapiens
  Table A; HLA-A*03:02; KRAS; G12S; 0
VVGASGVGK

SEQ ID NO: 19772 - protein, 9 aa, Homo sapiens
  Table A; HLA-A*11:01; KRAS; G12S; 1
VVGASGVGK

SEQ ID NO: 19773 - protein, 9 aa, Homo sapiens
  Table A; HLA-A*68:01; KRAS; G12S; 0
VVGASGVGK

SEQ ID NO: 19774 - protein, 9 aa, Homo sapiens
  Table A; HLA-B*27:02; KRAS; G12S; 0
VVGASGVGK

SEQ ID NO: 19775 - protein, 10 aa, Homo sapiens
  Table A; HLA-C*08:03; KRAS; G12S; 0
VVGASGVGKS

SEQ ID NO: 19776 - protein, 9 aa, Homo sapiens
  Table A; HLA-A*02:01; KRAS; G12V; 1
VVGAVGVGK

SEQ ID NO: 19777 - protein, 9 aa, Homo sapiens
  Table A; HLA-A*03:01; KRAS; G12V; 1
VVGAVGVGK

SEQ ID NO: 19778 - protein, 9 aa, Homo sapiens
  Table A; HLA-A*03:02; KRAS; G12V; 1
VVGAVGVGK

SEQ ID NO: 19779 - protein, 9 aa, Homo sapiens
  Table A; HLA-A*11:01; KRAS; G12V; 1
VVGAVGVGK

SEQ ID NO: 19780 - protein, 9 aa, Homo sapiens
  Table A; HLA-A*26:03; KRAS; G12V; 0
VVGAVGVGK

SEQ ID NO: 19781 - protein, 9 aa, Homo sapiens
  Table A; HLA-A*30:01; KRAS; G12V; 1
VVGAVGVGK

SEQ ID NO: 19782 - protein, 9 aa, Homo sapiens
  Table A; HLA-A*31:01; KRAS; G12V; 1
VVGAVGVGK

SEQ ID NO: 19783 - protein, 9 aa, Homo sapiens
  Table A; HLA-A*33:03; KRAS; G12V; 0
VVGAVGVGK

SEQ ID NO: 19784 - protein, 9 aa, Homo sapiens
  Table A; HLA-A*68:01; KRAS; G12V; 1
VVGAVGVGK

SEQ ID NO: 19785 - protein, 9 aa, Homo sapiens
  Table A; HLA-B*27:02; KRAS; G12V; 1
VVGAVGVGK

SEQ ID NO: 19786 - protein, 10 aa, Homo sapiens
  Table A; HLA-B*48:01; KRAS; G12V; 0
VVGAVGVGKS

SEQ ID NO: 19787 - protein, 10 aa, Homo sapiens
  Table A; HLA-C*08:03; KRAS; G12V; 0
VVGAVGVGKS

SEQ ID NO: 19788 - protein, 8 aa, Homo sapiens
  Table A; HLA-A*31:01; CNTNAP2; R283H; 0
VVIEHQGR

SEQ ID NO: 19789 - protein, 8 aa, Homo sapiens
  Table A; HLA-A*33:03; CNTNAP2; R283H; 0
VVIEHQGR

SEQ ID NO: 19790 - protein, 8 aa, Homo sapiens
  Table A; HLA-A*68:01; CNTNAP2; R283H; 0
VVIEHQGR

SEQ ID NO: 19791 - protein, 10 aa, Homo sapiens
  Table A; HLA-A*02:03; CNTNAP2; R283H; 0
VVIEHQGRSI

SEQ ID NO: 19792 - protein, 9 aa, Homo sapiens
  Table A; HLA-A*02:04; VHL; L89H; 0
VVLPVWHNF

SEQ ID NO: 19793 - protein, 9 aa, Homo sapiens
  Table A; HLA-A*23:01; VHL; L89H; 0
VVLPVWHNF

SEQ ID NO: 19794 - protein, 9 aa, Homo sapiens
  Table A; HLA-A*24:02; VHL; L89H; 1
VVLPVWHNF

SEQ ID NO: 19795 - protein, 9 aa, Homo sapiens
  Table A; HLA-A*29:02; VHL; L89H; 1
VVLPVWHNF

SEQ ID NO: 19796 - protein, 9 aa, Homo sapiens
  Table A; HLA-B*57:01; VHL; L89H; 1
VVLPVWHNF

SEQ ID NO: 19797 - protein, 9 aa, Homo sapiens
  Table A; HLA-A*02:01; EGFR; G598V; 1
VVMGENNTL

SEQ ID NO: 19798 - protein, 9 aa, Homo sapiens
  Table A; HLA-A*02:04; EGFR; G598V; 0
VVMGENNTL

SEQ ID NO: 19799 - protein, 9 aa, Homo sapiens
  Table A; HLA-A*02:05; EGFR; G598V; 0
VVMGENNTL

SEQ ID NO: 19800 - protein, 9 aa, Homo sapiens
  Table A; HLA-A*02:06; EGFR; G598V; 0
VVMGENNTL

SEQ ID NO: 19801 - protein, 9 aa, Homo sapiens
  Table A; HLA-A*02:08; EGFR; G598V; 0
VVMGENNTL

SEQ ID NO: 19802 - protein, 9 aa, Homo sapiens
  Table A; HLA-B*13:01; EGFR; G598V; 0
VVMGENNTL

SEQ ID NO: 19803 - protein, 9 aa, Homo sapiens
  Table A; HLA-B*15:01; EGFR; G598V; 1
VVMGENNTL

SEQ ID NO: 19804 - protein, 9 aa, Homo sapiens
  Table A; HLA-B*15:02; EGFR; G598V; 0
VVMGENNTL

SEQ ID NO: 19805 - protein, 9 aa, Homo sapiens
  Table A; HLA-B*35:02; EGFR; G598V; 0
VVMGENNTL

SEQ ID NO: 19806 - protein, 9 aa, Homo sapiens
  Table A; HLA-B*35:03; EGFR; G598V; 0
VVMGENNTL

SEQ ID NO: 19807 - protein, 9 aa, Homo sapiens
  Table A; HLA-B*35:12; EGFR; G598V; 0
VVMGENNTL

SEQ ID NO: 19808 - protein, 9 aa, Homo sapiens
  Table A; HLA-B*38:01; EGFR; G598V; 1
VVMGENNTL

SEQ ID NO: 19809 - protein, 9 aa, Homo sapiens
  Table A; HLA-B*48:01; EGFR; G598V; 0
VVMGENNTL

SEQ ID NO: 19810 - protein, 9 aa, Homo sapiens
  Table A; HLA-B*50:01; EGFR; G598V; 0
VVMGENNTL

SEQ ID NO: 19811 - protein, 9 aa, Homo sapiens
  Table A; HLA-B*58:01; EGFR; G598V; 0
VVMGENNTL

SEQ ID NO: 19812 - protein, 9 aa, Homo sapiens
  Table A; HLA-C*03:03; EGFR; G598V; 1
VVMGENNTL

SEQ ID NO: 19813 - protein, 9 aa, Homo sapiens
  Table A; HLA-C*03:04; EGFR; G598V; 1
VVMGENNTL

SEQ ID NO: 19814 - protein, 9 aa, Homo sapiens
  Table A; HLA-C*08:01; EGFR; G598V; 0
VVMGENNTL

SEQ ID NO: 19815 - protein, 10 aa, Homo sapiens
  Table A; HLA-B*50:01; EGFR; G598V; 0
VVMGENNTLV

SEQ ID NO: 19816 - protein, 11 aa, Homo sapiens
  Table A; HLA-A*11:01; EGFR; G598V; 1
VVMGENNTLVW

SEQ ID NO: 19817 - protein, 11 aa, Homo sapiens
  Table A; HLA-A*25:01; EGFR; G598V; 1
VVMGENNTLVW

SEQ ID NO: 19818 - protein, 11 aa, Homo sapiens
  Table A; HLA-B*57:01; EGFR; G598V; 1
VVMGENNTLVW

SEQ ID NO: 19819 - protein, 8 aa, Homo sapiens
  Table A; HLA-A*02:04; XPO1; E571K; 0
VVNKLFKF

SEQ ID NO: 19820 - protein, 8 aa, Homo sapiens
  Table A; HLA-A*23:01; XPO1; E571K; 0
VVNKLFKF

SEQ ID NO: 19821 - protein, 8 aa, Homo sapiens
  Table A; HLA-A*24:02; XPO1; E571K; 1
VVNKLFKF

SEQ ID NO: 19822 - protein, 8 aa, Homo sapiens
  Table A; HLA-B*57:01; XPO1; E571K; 0
VVNKLFKF

SEQ ID NO: 19823 - protein, 11 aa, Homo sapiens
  Table A; HLA-A*31:01; PIK3CA; G106V; 0
VVNREEKILNR

SEQ ID NO: 19824 - protein, 9 aa, Homo sapiens
  Table A; HLA-A*02:01; TP53; Y220C; 1
VVPCEPPEV

SEQ ID NO: 19825 - protein, 9 aa, Homo sapiens
  Table A; HLA-A*02:06; TP53; Y220C; 0
VVPCEPPEV

SEQ ID NO: 19826 - protein, 9 aa, Homo sapiens
  Table A; HLA-A*02:07; TP53; Y220C; 0
VVPCEPPEV

SEQ ID NO: 19827 - protein, 10 aa, Homo sapiens
  Table A; HLA-A*31:01; TP53; C176F; 0
VVRRFPHHER

SEQ ID NO: 19828 - protein, 11 aa, Homo sapiens
  Table A; HLA-A*68:01; FBXW7; R479Q; 0
VVSGSQDATLR

SEQ ID NO: 19829 - protein, 8 aa, Homo sapiens
  Table A; HLA-A*02:03; KRAS; G12A; 0
VVVGAAGV

SEQ ID NO: 19830 - protein, 8 aa, Homo sapiens
  Table A; HLA-B*13:02; KRAS; G12A; 1
VVVGAAGV

SEQ ID NO: 19831 - protein, 10 aa, Homo sapiens
  Table A; HLA-A*03:01; KRAS; G12A; 1
VVVGAAGVGK

SEQ ID NO: 19832 - protein, 10 aa, Homo sapiens
  Table A; HLA-A*03:02; KRAS; G12A; 0
VVVGAAGVGK

SEQ ID NO: 19833 - protein, 10 aa, Homo sapiens
  Table A; HLA-A*11:01; KRAS; G12A; 1
VVVGAAGVGK

SEQ ID NO: 19834 - protein, 10 aa, Homo sapiens
  Table A; HLA-A*26:03; KRAS; G12A; 0
VVVGAAGVGK

SEQ ID NO: 19835 - protein, 10 aa, Homo sapiens
  Table A; HLA-A*30:01; KRAS; G12A; 0
VVVGAAGVGK

SEQ ID NO: 19836 - protein, 10 aa, Homo sapiens
  Table A; HLA-A*68:01; KRAS; G12A; 1
VVVGAAGVGK

SEQ ID NO: 19837 - protein, 10 aa, Homo sapiens
  Table A; HLA-A*68:02; KRAS; G12A; 0
VVVGAAGVGK

SEQ ID NO: 19838 - protein, 10 aa, Homo sapiens
  Table A; HLA-B*27:02; KRAS; G12A; 0
VVVGAAGVGK

SEQ ID NO: 19839 - protein, 11 aa, Homo sapiens
  Table A; HLA-A*02:06; KRAS; G12A; 0
VVVGAAGVGKS

SEQ ID NO: 19840 - protein, 11 aa, Homo sapiens
  Table A; HLA-A*03:02; KRAS; G12A; 0
VVVGAAGVGKS

SEQ ID NO: 19841 - protein, 11 aa, Homo sapiens
  Table A; HLA-A*11:01; KRAS; G12A; 1
VVVGAAGVGKS

SEQ ID NO: 19842 - protein, 11 aa, Homo sapiens
  Table A; HLA-A*26:01; KRAS; G12A; 1
VVVGAAGVGKS

SEQ ID NO: 19843 - protein, 11 aa, Homo sapiens
  Table A; HLA-A*68:01; KRAS; G12A; 1
VVVGAAGVGKS

SEQ ID NO: 19844 - protein, 11 aa, Homo sapiens
  Table A; HLA-B*48:01; KRAS; G12A; 0
VVVGAAGVGKS

SEQ ID NO: 19845 - protein, 11 aa, Homo sapiens
  Table A; HLA-C*07:04; KRAS; G12A; 0
VVVGAAGVGKS

SEQ ID NO: 19846 - protein, 11 aa, Homo sapiens
  Table A; HLA-C*08:03; KRAS; G12A; 0
VVVGAAGVGKS

SEQ ID NO: 19847 - protein, 8 aa, Homo sapiens
  Table A; HLA-B*13:02; NRAS; G12C; 0
VVVGACGV

SEQ ID NO: 19848 - protein, 10 aa, Homo sapiens
  Table A; HLA-A*03:01; KRAS; G12C; 1
VVVGACGVGK

SEQ ID NO: 19849 - protein, 10 aa, Homo sapiens
  Table A; HLA-A*03:02; KRAS; G12C; 0
VVVGACGVGK

SEQ ID NO: 19850 - protein, 10 aa, Homo sapiens
  Table A; HLA-A*11:01; KRAS; G12C; 1
VVVGACGVGK

SEQ ID NO: 19851 - protein, 10 aa, Homo sapiens
  Table A; HLA-A*26:03; KRAS; G12C; 0
VVVGACGVGK

SEQ ID NO: 19852 - protein, 10 aa, Homo sapiens
  Table A; HLA-A*68:01; KRAS; G12C; 1
VVVGACGVGK

SEQ ID NO: 19853 - protein, 10 aa, Homo sapiens
  Table A; HLA-B*27:02; KRAS; G12C; 0
VVVGACGVGK

SEQ ID NO: 19854 - protein, 10 aa, Homo sapiens
  Table A; HLA-A*03:01; NRAS; G12C; 1
VVVGACGVGK

SEQ ID NO: 19855 - protein, 10 aa, Homo sapiens
  Table A; HLA-A*03:02; NRAS; G12C; 0
VVVGACGVGK

SEQ ID NO: 19856 - protein, 10 aa, Homo sapiens
  Table A; HLA-A*11:01; NRAS; G12C; 0
VVVGACGVGK

SEQ ID NO: 19857 - protein, 10 aa, Homo sapiens
  Table A; HLA-A*26:03; NRAS; G12C; 0
VVVGACGVGK

SEQ ID NO: 19858 - protein, 10 aa, Homo sapiens
  Table A; HLA-A*68:01; NRAS; G12C; 0
VVVGACGVGK

SEQ ID NO: 19859 - protein, 10 aa, Homo sapiens
  Table A; HLA-B*27:02; NRAS; G12C; 0
VVVGACGVGK

SEQ ID NO: 19860 - protein, 8 aa, Homo sapiens
  Table A; HLA-B*13:02; KRAS; G12D; 1
VVVGADGV

SEQ ID NO: 19861 - protein, 8 aa, Homo sapiens
  Table A; HLA-B*13:02; NRAS; G12D; 0
VVVGADGV

SEQ ID NO: 19862 - protein, 10 aa, Homo sapiens
  Table A; HLA-A*02:06; KRAS; G12D; 1
VVVGADGVGK

SEQ ID NO: 19863 - protein, 10 aa, Homo sapiens
  Table A; HLA-A*03:01; KRAS; G12D; 1
VVVGADGVGK

SEQ ID NO: 19864 - protein, 10 aa, Homo sapiens
  Table A; HLA-A*03:02; KRAS; G12D; 1
VVVGADGVGK

SEQ ID NO: 19865 - protein, 10 aa, Homo sapiens
  Table A; HLA-A*11:01; KRAS; G12D; 1
VVVGADGVGK

SEQ ID NO: 19866 - protein, 10 aa, Homo sapiens
  Table A; HLA-A*26:03; KRAS; G12D; 0
VVVGADGVGK

SEQ ID NO: 19867 - protein, 10 aa, Homo sapiens
  Table A; HLA-A*30:01; KRAS; G12D; 1
VVVGADGVGK

SEQ ID NO: 19868 - protein, 10 aa, Homo sapiens
  Table A; HLA-A*68:01; KRAS; G12D; 1
VVVGADGVGK

SEQ ID NO: 19869 - protein, 10 aa, Homo sapiens
  Table A; HLA-A*68:02; KRAS; G12D; 1
VVVGADGVGK

SEQ ID NO: 19870 - protein, 10 aa, Homo sapiens
  Table A; HLA-B*27:02; KRAS; G12D; 1
VVVGADGVGK

SEQ ID NO: 19871 - protein, 10 aa, Homo sapiens
  Table A; HLA-B*48:01; KRAS; G12D; 0
VVVGADGVGK

SEQ ID NO: 19872 - protein, 10 aa, Homo sapiens
  Table A; HLA-A*02:06; NRAS; G12D; 0
VVVGADGVGK

SEQ ID NO: 19873 - protein, 10 aa, Homo sapiens
  Table A; HLA-A*03:01; NRAS; G12D; 1
VVVGADGVGK

SEQ ID NO: 19874 - protein, 10 aa, Homo sapiens
  Table A; HLA-A*03:02; NRAS; G12D; 0
VVVGADGVGK

SEQ ID NO: 19875 - protein, 10 aa, Homo sapiens
  Table A; HLA-A*11:01; NRAS; G12D; 1
VVVGADGVGK

SEQ ID NO: 19876 - protein, 10 aa, Homo sapiens
  Table A; HLA-A*26:03; NRAS; G12D; 0
VVVGADGVGK

SEQ ID NO: 19877 - protein, 10 aa, Homo sapiens
  Table A; HLA-A*30:01; NRAS; G12D; 0
VVVGADGVGK

SEQ ID NO: 19878 - protein, 10 aa, Homo sapiens
  Table A; HLA-A*68:01; NRAS; G12D; 0
VVVGADGVGK

SEQ ID NO: 19879 - protein, 10 aa, Homo sapiens
  Table A; HLA-A*68:02; NRAS; G12D; 0
VVVGADGVGK

SEQ ID NO: 19880 - protein, 10 aa, Homo sapiens
  Table A; HLA-B*27:02; NRAS; G12D; 0
VVVGADGVGK

SEQ ID NO: 19881 - protein, 10 aa, Homo sapiens
  Table A; HLA-B*48:01; NRAS; G12D; 0
VVVGADGVGK

SEQ ID NO: 19882 - protein, 11 aa, Homo sapiens
  Table A; HLA-A*02:05; KRAS; G12D; 1
VVVGADGVGKS

SEQ ID NO: 19883 - protein, 11 aa, Homo sapiens
  Table A; HLA-A*02:06; KRAS; G12D; 1
VVVGADGVGKS

SEQ ID NO: 19884 - protein, 11 aa, Homo sapiens
  Table A; HLA-A*11:01; KRAS; G12D; 1
VVVGADGVGKS

SEQ ID NO: 19885 - protein, 11 aa, Homo sapiens
  Table A; HLA-A*26:01; KRAS; G12D; 1
VVVGADGVGKS

SEQ ID NO: 19886 - protein, 11 aa, Homo sapiens
  Table A; HLA-A*68:01; KRAS; G12D; 1
VVVGADGVGKS

SEQ ID NO: 19887 - protein, 11 aa, Homo sapiens
  Table A; HLA-B*48:01; KRAS; G12D; 0
VVVGADGVGKS

SEQ ID NO: 19888 - protein, 11 aa, Homo sapiens
  Table A; HLA-C*07:04; KRAS; G12D; 1
VVVGADGVGKS

SEQ ID NO: 19889 - protein, 11 aa, Homo sapiens
  Table A; HLA-C*08:03; KRAS; G12D; 0
VVVGADGVGKS

SEQ ID NO: 19890 - protein, 11 aa, Homo sapiens
  Table A; HLA-A*02:05; NRAS; G12D; 0
VVVGADGVGKS

SEQ ID NO: 19891 - protein, 11 aa, Homo sapiens
  Table A; HLA-A*02:06; NRAS; G12D; 0
VVVGADGVGKS

SEQ ID NO: 19892 - protein, 11 aa, Homo sapiens
  Table A; HLA-A*11:01; NRAS; G12D; 1
VVVGADGVGKS

SEQ ID NO: 19893 - protein, 11 aa, Homo sapiens
  Table A; HLA-A*26:01; NRAS; G12D; 0
VVVGADGVGKS

SEQ ID NO: 19894 - protein, 11 aa, Homo sapiens
  Table A; HLA-A*68:01; NRAS; G12D; 0
VVVGADGVGKS

SEQ ID NO: 19895 - protein, 11 aa, Homo sapiens
  Table A; HLA-B*48:01; NRAS; G12D; 0
VVVGADGVGKS

SEQ ID NO: 19896 - protein, 11 aa, Homo sapiens
  Table A; HLA-C*07:04; NRAS; G12D; 0
VVVGADGVGKS

SEQ ID NO: 19897 - protein, 11 aa, Homo sapiens
  Table A; HLA-C*08:03; NRAS; G12D; 0
VVVGADGVGKS

SEQ ID NO: 19898 - protein, 10 aa, Homo sapiens
  Table A; HLA-A*03:01; KRAS; G13C; 1
VVVGAGCVGK

SEQ ID NO: 19899 - protein, 10 aa, Homo sapiens
  Table A; HLA-A*03:02; KRAS; G13C; 0
VVVGAGCVGK

SEQ ID NO: 19900 - protein, 10 aa, Homo sapiens
  Table A; HLA-A*11:01; KRAS; G13C; 1
VVVGAGCVGK

SEQ ID NO: 19901 - protein, 10 aa, Homo sapiens
  Table A; HLA-A*26:03; KRAS; G13C; 0
VVVGAGCVGK

SEQ ID NO: 19902 - protein, 10 aa, Homo sapiens
  Table A; HLA-A*68:01; KRAS; G13C; 0
VVVGAGCVGK

SEQ ID NO: 19903 - protein, 10 aa, Homo sapiens
  Table A; HLA-B*27:02; KRAS; G13C; 0
VVVGAGCVGK

SEQ ID NO: 19904 - protein, 9 aa, Homo sapiens
  Table A; HLA-B*39:01; KRAS; G13D; 0
VVVGAGDVG

SEQ ID NO: 19905 - protein, 10 aa, Homo sapiens
  Table A; HLA-A*02:06; KRAS; G13D; 0
VVVGAGDVGK

SEQ ID NO: 19906 - protein, 10 aa, Homo sapiens
  Table A; HLA-A*03:01; KRAS; G13D; 1
VVVGAGDVGK

SEQ ID NO: 19907 - protein, 10 aa, Homo sapiens
  Table A; HLA-A*03:02; KRAS; G13D; 0
VVVGAGDVGK

SEQ ID NO: 19908 - protein, 10 aa, Homo sapiens
  Table A; HLA-A*11:01; KRAS; G13D; 1
VVVGAGDVGK

SEQ ID NO: 19909 - protein, 10 aa, Homo sapiens
  Table A; HLA-A*26:03; KRAS; G13D; 0
VVVGAGDVGK

SEQ ID NO: 19910 - protein, 10 aa, Homo sapiens
  Table A; HLA-A*68:01; KRAS; G13D; 1
VVVGAGDVGK

SEQ ID NO: 19911 - protein, 10 aa, Homo sapiens
  Table A; HLA-A*68:02; KRAS; G13D; 0
VVVGAGDVGK

SEQ ID NO: 19912 - protein, 10 aa, Homo sapiens
  Table A; HLA-B*27:02; KRAS; G13D; 0
VVVGAGDVGK

SEQ ID NO: 19913 - protein, 10 aa, Homo sapiens
  Table A; HLA-B*57:01; KRAS; G13D; 1
VVVGAGDVGK

SEQ ID NO: 19914 - protein, 11 aa, Homo sapiens
  Table A; HLA-A*02:05; KRAS; G13D; 0
VVVGAGDVGKS

SEQ ID NO: 19915 - protein, 11 aa, Homo sapiens
  Table A; HLA-A*26:01; KRAS; G13D; 1
VVVGAGDVGKS

SEQ ID NO: 19916 - protein, 11 aa, Homo sapiens
  Table A; HLA-A*68:01; KRAS; G13D; 1
VVVGAGDVGKS

SEQ ID NO: 19917 - protein, 11 aa, Homo sapiens
  Table A; HLA-B*48:01; KRAS; G13D; 0
VVVGAGDVGKS

SEQ ID NO: 19918 - protein, 11 aa, Homo sapiens
  Table A; HLA-C*07:04; KRAS; G13D; 0
VVVGAGDVGKS

SEQ ID NO: 19919 - protein, 11 aa, Homo sapiens
  Table A; HLA-C*08:01; KRAS; G13D; 0
VVVGAGDVGKS

SEQ ID NO: 19920 - protein, 11 aa, Homo sapiens
  Table A; HLA-C*08:03; KRAS; G13D; 0
VVVGAGDVGKS

SEQ ID NO: 19921 - protein, 8 aa, Homo sapiens
  Table A; HLA-B*13:02; NRAS; G13R; 0
VVVGAGRV

SEQ ID NO: 19922 - protein, 8 aa, Homo sapiens
  Table A; HLA-C*07:04; NRAS; G13R; 0
VVVGAGRV

SEQ ID NO: 19923 - protein, 10 aa, Homo sapiens
  Table A; HLA-A*03:01; NRAS; G13R; 1
VVVGAGRVGK

SEQ ID NO: 19924 - protein, 10 aa, Homo sapiens
  Table A; HLA-A*03:02; NRAS; G13R; 0
VVVGAGRVGK

SEQ ID NO: 19925 - protein, 10 aa, Homo sapiens
  Table A; HLA-A*11:01; NRAS; G13R; 0
VVVGAGRVGK

SEQ ID NO: 19926 - protein, 10 aa, Homo sapiens
  Table A; HLA-A*26:03; NRAS; G13R; 0
VVVGAGRVGK

SEQ ID NO: 19927 - protein, 10 aa, Homo sapiens
  Table A; HLA-A*31:01; NRAS; G13R; 0
VVVGAGRVGK

SEQ ID NO: 19928 - protein, 10 aa, Homo sapiens
  Table A; HLA-A*68:01; NRAS; G13R; 0
VVVGAGRVGK

SEQ ID NO: 19929 - protein, 10 aa, Homo sapiens
  Table A; HLA-B*57:01; NRAS; G13R; 0
VVVGAGRVGK

SEQ ID NO: 19930 - protein, 11 aa, Homo sapiens
  Table A; HLA-A*11:01; NRAS; G13R; 0
VVVGAGRVGKS

SEQ ID NO: 19931 - protein, 11 aa, Homo sapiens
  Table A; HLA-B*48:01; NRAS; G13R; 0
VVVGAGRVGKS

SEQ ID NO: 19932 - protein, 8 aa, Homo sapiens
  Table A; HLA-B*13:02; KRAS; G12R; 1
VVVGARGV

SEQ ID NO: 19933 - protein, 10 aa, Homo sapiens
  Table A; HLA-A*03:01; KRAS; G12R; 1
VVVGARGVGK

SEQ ID NO: 19934 - protein, 10 aa, Homo sapiens
  Table A; HLA-A*03:02; KRAS; G12R; 0
VVVGARGVGK

SEQ ID NO: 19935 - protein, 10 aa, Homo sapiens
  Table A; HLA-A*11:01; KRAS; G12R; 1
VVVGARGVGK

SEQ ID NO: 19936 - protein, 10 aa, Homo sapiens
  Table A; HLA-A*26:03; KRAS; G12R; 0
VVVGARGVGK

SEQ ID NO: 19937 - protein, 10 aa, Homo sapiens
  Table A; HLA-A*68:01; KRAS; G12R; 1
VVVGARGVGK

SEQ ID NO: 19938 - protein, 11 aa, Homo sapiens
  Table A; HLA-B*48:01; KRAS; G12R; 0
VVVGARGVGKS

SEQ ID NO: 19939 - protein, 8 aa, Homo sapiens
  Table A; HLA-A*02:03; KRAS; G12S; 0
VVVGASGV

SEQ ID NO: 19940 - protein, 8 aa, Homo sapiens
  Table A; HLA-A*02:06; KRAS; G12S; 0
VVVGASGV

SEQ ID NO: 19941 - protein, 8 aa, Homo sapiens
  Table A; HLA-B*13:02; KRAS; G12S; 0
VVVGASGV

SEQ ID NO: 19942 - protein, 10 aa, Homo sapiens
  Table A; HLA-A*03:01; KRAS; G12S; 1
VVVGASGVGK

SEQ ID NO: 19943 - protein, 10 aa, Homo sapiens
  Table A; HLA-A*03:02; KRAS; G12S; 0
VVVGASGVGK

SEQ ID NO: 19944 - protein, 10 aa, Homo sapiens
  Table A; HLA-A*11:01; KRAS; G12S; 1
VVVGASGVGK

SEQ ID NO: 19945 - protein, 10 aa, Homo sapiens
  Table A; HLA-A*26:03; KRAS; G12S; 0
VVVGASGVGK

SEQ ID NO: 19946 - protein, 10 aa, Homo sapiens
  Table A; HLA-A*30:01; KRAS; G12S; 0
VVVGASGVGK

SEQ ID NO: 19947 - protein, 10 aa, Homo sapiens
  Table A; HLA-A*31:01; KRAS; G12S; 0
VVVGASGVGK

SEQ ID NO: 19948 - protein, 10 aa, Homo sapiens
  Table A; HLA-A*33:03; KRAS; G12S; 0
VVVGASGVGK

SEQ ID NO: 19949 - protein, 10 aa, Homo sapiens
  Table A; HLA-A*68:01; KRAS; G12S; 0
VVVGASGVGK

SEQ ID NO: 19950 - protein, 10 aa, Homo sapiens
  Table A; HLA-A*68:02; KRAS; G12S; 0
VVVGASGVGK

SEQ ID NO: 19951 - protein, 10 aa, Homo sapiens
  Table A; HLA-B*27:02; KRAS; G12S; 0
VVVGASGVGK

SEQ ID NO: 19952 - protein, 11 aa, Homo sapiens
  Table A; HLA-A*02:05; KRAS; G12S; 0
VVVGASGVGKS

SEQ ID NO: 19953 - protein, 11 aa, Homo sapiens
  Table A; HLA-A*02:06; KRAS; G12S; 0
VVVGASGVGKS

SEQ ID NO: 19954 - protein, 11 aa, Homo sapiens
  Table A; HLA-A*02:08; KRAS; G12S; 0
VVVGASGVGKS

SEQ ID NO: 19955 - protein, 11 aa, Homo sapiens
  Table A; HLA-A*03:01; KRAS; G12S; 1
VVVGASGVGKS

SEQ ID NO: 19956 - protein, 11 aa, Homo sapiens
  Table A; HLA-A*03:02; KRAS; G12S; 0
VVVGASGVGKS

SEQ ID NO: 19957 - protein, 11 aa, Homo sapiens
  Table A; HLA-A*11:01; KRAS; G12S; 1
VVVGASGVGKS

SEQ ID NO: 19958 - protein, 11 aa, Homo sapiens
  Table A; HLA-A*26:01; KRAS; G12S; 0
VVVGASGVGKS

SEQ ID NO: 19959 - protein, 11 aa, Homo sapiens
  Table A; HLA-A*26:03; KRAS; G12S; 0
VVVGASGVGKS

SEQ ID NO: 19960 - protein, 11 aa, Homo sapiens
  Table A; HLA-A*68:01; KRAS; G12S; 0
VVVGASGVGKS

SEQ ID NO: 19961 - protein, 11 aa, Homo sapiens
  Table A; HLA-B*48:01; KRAS; G12S; 0
VVVGASGVGKS

SEQ ID NO: 19962 - protein, 11 aa, Homo sapiens
  Table A; HLA-C*07:04; KRAS; G12S; 0
VVVGASGVGKS

SEQ ID NO: 19963 - protein, 11 aa, Homo sapiens
  Table A; HLA-C*08:03; KRAS; G12S; 0
VVVGASGVGKS

SEQ ID NO: 19964 - protein, 8 aa, Homo sapiens
  Table A; HLA-A*02:03; KRAS; G12V; 0
VVVGAVGV

SEQ ID NO: 19965 - protein, 8 aa, Homo sapiens
  Table A; HLA-A*02:05; KRAS; G12V; 1
VVVGAVGV

SEQ ID NO: 19966 - protein, 8 aa, Homo sapiens
  Table A; HLA-A*02:06; KRAS; G12V; 1
VVVGAVGV

SEQ ID NO: 19967 - protein, 8 aa, Homo sapiens
  Table A; HLA-A*68:02; KRAS; G12V; 1
VVVGAVGV

SEQ ID NO: 19968 - protein, 8 aa, Homo sapiens
  Table A; HLA-B*13:02; KRAS; G12V; 1
VVVGAVGV

SEQ ID NO: 19969 - protein, 8 aa, Homo sapiens
  Table A; HLA-B*39:06; KRAS; G12V; 1
VVVGAVGV

SEQ ID NO: 19970 - protein, 8 aa, Homo sapiens
  Table A; HLA-B*40:02; KRAS; G12V; 1
VVVGAVGV

SEQ ID NO: 19971 - protein, 8 aa, Homo sapiens
  Table A; HLA-B*48:01; KRAS; G12V; 0
VVVGAVGV

SEQ ID NO: 19972 - protein, 9 aa, Homo sapiens
  Table A; HLA-A*26:01; KRAS; G12V; 1
VVVGAVGVG

SEQ ID NO: 19973 - protein, 10 aa, Homo sapiens
  Table A; HLA-A*02:08; KRAS; G12V; 0
VVVGAVGVGK

SEQ ID NO: 19974 - protein, 10 aa, Homo sapiens
  Table A; HLA-A*03:01; KRAS; G12V; 1
VVVGAVGVGK

SEQ ID NO: 19975 - protein, 10 aa, Homo sapiens
  Table A; HLA-A*03:02; KRAS; G12V; 1
VVVGAVGVGK

SEQ ID NO: 19976 - protein, 10 aa, Homo sapiens
  Table A; HLA-A*11:01; KRAS; G12V; 1
VVVGAVGVGK

SEQ ID NO: 19977 - protein, 10 aa, Homo sapiens
  Table A; HLA-A*26:03; KRAS; G12V; 0
VVVGAVGVGK

SEQ ID NO: 19978 - protein, 10 aa, Homo sapiens
  Table A; HLA-A*30:01; KRAS; G12V; 1
VVVGAVGVGK

SEQ ID NO: 19979 - protein, 10 aa, Homo sapiens
  Table A; HLA-A*31:01; KRAS; G12V; 1
VVVGAVGVGK

SEQ ID NO: 19980 - protein, 10 aa, Homo sapiens
  Table A; HLA-A*33:03; KRAS; G12V; 0
VVVGAVGVGK

SEQ ID NO: 19981 - protein, 10 aa, Homo sapiens
  Table A; HLA-A*68:01; KRAS; G12V; 1
VVVGAVGVGK

SEQ ID NO: 19982 - protein, 10 aa, Homo sapiens
  Table A; HLA-A*68:02; KRAS; G12V; 1
VVVGAVGVGK

SEQ ID NO: 19983 - protein, 10 aa, Homo sapiens
  Table A; HLA-B*27:02; KRAS; G12V; 1
VVVGAVGVGK

SEQ ID NO: 19984 - protein, 10 aa, Homo sapiens
  Table A; HLA-B*27:05; KRAS; G12V; 1
VVVGAVGVGK

SEQ ID NO: 19985 - protein, 10 aa, Homo sapiens
  Table A; HLA-B*57:01; KRAS; G12V; 1
VVVGAVGVGK

SEQ ID NO: 19986 - protein, 11 aa, Homo sapiens
  Table A; HLA-A*02:06; KRAS; G12V; 1
VVVGAVGVGKS

SEQ ID NO: 19987 - protein, 11 aa, Homo sapiens
  Table A; HLA-A*26:01; KRAS; G12V; 1
VVVGAVGVGKS

SEQ ID NO: 19988 - protein, 11 aa, Homo sapiens
  Table A; HLA-A*68:01; KRAS; G12V; 1
VVVGAVGVGKS

SEQ ID NO: 19989 - protein, 11 aa, Homo sapiens
  Table A; HLA-B*48:01; KRAS; G12V; 0
VVVGAVGVGKS

SEQ ID NO: 19990 - protein, 11 aa, Homo sapiens
  Table A; HLA-C*07:04; KRAS; G12V; 1
VVVGAVGVGKS

SEQ ID NO: 19991 - protein, 11 aa, Homo sapiens
  Table A; HLA-C*08:03; KRAS; G12V; 0
VVVGAVGVGKS

SEQ ID NO: 19992 - protein, 10 aa, Homo sapiens
  Table A; HLA-A*02:01; TP53; Y220C; 1
VVVPCEPPEV

SEQ ID NO: 19993 - protein, 10 aa, Homo sapiens
  Table A; HLA-A*02:06; TP53; Y220C; 0
VVVPCEPPEV

SEQ ID NO: 19994 - protein, 10 aa, Homo sapiens
  Table A; HLA-A*02:07; TP53; Y220C; 0
VVVPCEPPEV

SEQ ID NO: 19995 - protein, 9 aa, Homo sapiens
  Table A; HLA-A*23:01; CDKN2A; H83Y; 0
VYDAAREGF

SEQ ID NO: 19996 - protein, 9 aa, Homo sapiens
  Table A; HLA-A*24:02; CDKN2A; H83Y; 1
VYDAAREGF

SEQ ID NO: 19997 - protein, 9 aa, Homo sapiens
  Table A; HLA-B*15:03; CDKN2A; H83Y; 0
VYDAAREGF

SEQ ID NO: 19998 - protein, 9 aa, Homo sapiens
  Table A; HLA-B*38:01; CDKN2A; H83Y; 0
VYDAAREGF

SEQ ID NO: 19999 - protein, 9 aa, Homo sapiens
  Table A; HLA-C*04:01; CDKN2A; H83Y; 1
VYDAAREGF

SEQ ID NO: 20000 - protein, 9 aa, Homo sapiens
  Table A; HLA-C*05:01; CDKN2A; H83Y; 1
VYDAAREGF

SEQ ID NO: 20001 - protein, 9 aa, Homo sapiens
  Table A; HLA-C*07:02; CDKN2A; H83Y; 1
VYDAAREGF

SEQ ID NO: 20002 - protein, 9 aa, Homo sapiens
  Table A; HLA-C*08:02; CDKN2A; H83Y; 0
VYDAAREGF

SEQ ID NO: 20003 - protein, 9 aa, Homo sapiens
  Table A; HLA-C*14:02; CDKN2A; H83Y; 0
VYDAAREGF

SEQ ID NO: 20004 - protein, 9 aa, Homo sapiens
  Table A; HLA-C*14:03; CDKN2A; H83Y; 0
VYDAAREGF

SEQ ID NO: 20005 - protein, 10 aa, Homo sapiens
  Table A; HLA-C*04:01; CDKN2A; H83Y; 1
VYDAAREGFL

SEQ ID NO: 20006 - protein, 9 aa, Homo sapiens
  Table A; HLA-A*23:01; EZH2; M667T; 0
VYDKYTCSF

SEQ ID NO: 20007 - protein, 9 aa, Homo sapiens
  Table A; HLA-A*24:02; EZH2; M667T; 1
VYDKYTCSF

SEQ ID NO: 20008 - protein, 9 aa, Homo sapiens
  Table A; HLA-C*04:01; EZH2; M667T; 1
VYDKYTCSF

SEQ ID NO: 20009 - protein, 9 aa, Homo sapiens
  Table A; HLA-A*02:01; EP300; D1399N; 1
VYISYLNSV

SEQ ID NO: 20010 - protein, 9 aa, Homo sapiens
  Table A; HLA-A*02:03; EP300; D1399N; 0
VYISYLNSV

SEQ ID NO: 20011 - protein, 9 aa, Homo sapiens
  Table A; HLA-A*02:04; EP300; D1399N; 0
VYISYLNSV

SEQ ID NO: 20012 - protein, 9 aa, Homo sapiens
  Table A; HLA-A*23:01; EP300; D1399N; 0
VYISYLNSV

SEQ ID NO: 20013 - protein, 9 aa, Homo sapiens
  Table A; HLA-A*24:02; EP300; D1399N; 1
VYISYLNSV

SEQ ID NO: 20014 - protein, 9 aa, Homo sapiens
  Table A; HLA-B*46:01; EP300; D1399N; 0
VYISYLNSV

SEQ ID NO: 20015 - protein, 9 aa, Homo sapiens
  Table A; HLA-B*48:01; EP300; D1399N; 0
VYISYLNSV

SEQ ID NO: 20016 - protein, 9 aa, Homo sapiens
  Table A; HLA-C*06:02; EP300; D1399N; 1
VYISYLNSV

SEQ ID NO: 20017 - protein, 9 aa, Homo sapiens
  Table A; HLA-C*14:02; EP300; D1399N; 0
VYISYLNSV

SEQ ID NO: 20018 - protein, 9 aa, Homo sapiens
  Table A; HLA-C*14:03; EP300; D1399N; 0
VYISYLNSV

SEQ ID NO: 20019 - protein, 9 aa, Homo sapiens
  Table A; HLA-C*16:02; EP300; D1399N; 0
VYISYLNSV

SEQ ID NO: 20020 - protein, 11 aa, Homo sapiens
  Table A; HLA-A*23:01; EP300; D1399N; 0
VYISYLNSVHF

SEQ ID NO: 20021 - protein, 11 aa, Homo sapiens
  Table A; HLA-A*24:02; EP300; D1399N; 1
VYISYLNSVHF

SEQ ID NO: 20022 - protein, 9 aa, Homo sapiens
  Table A; HLA-A*03:01; CNBD1; L396P; 1
VYMGKPKEK

SEQ ID NO: 20023 - protein, 9 aa, Homo sapiens
  Table A; HLA-A*03:02; CNBD1; L396P; 0
VYMGKPKEK

SEQ ID NO: 20024 - protein, 9 aa, Homo sapiens
  Table A; HLA-A*11:01; CNBD1; L396P; 1
VYMGKPKEK

SEQ ID NO: 20025 - protein, 9 aa, Homo sapiens
  Table A; HLA-A*24:02; CNBD1; L396P; 1
VYMGKPKEK

SEQ ID NO: 20026 - protein, 9 aa, Homo sapiens
  Table A; HLA-A*31:01; CNBD1; L396P; 0
VYMGKPKEK

SEQ ID NO: 20027 - protein, 9 aa, Homo sapiens
  Table A; HLA-A*33:01; CNBD1; L396P; 0
VYMGKPKEK

SEQ ID NO: 20028 - protein, 9 aa, Homo sapiens
  Table A; HLA-A*33:03; CNBD1; L396P; 0
VYMGKPKEK

SEQ ID NO: 20029 - protein, 9 aa, Homo sapiens
  Table A; HLA-C*14:02; CNBD1; L396P; 0
VYMGKPKEK

SEQ ID NO: 20030 - protein, 10 aa, Homo sapiens
  Table A; HLA-A*33:03; SMAD4; G352V; 0
VYVDPSGGDR

SEQ ID NO: 20031 - protein, 10 aa, Homo sapiens
  Table A; HLA-B*39:01; SMAD4; G352V; 0
VYVDPSGGDR

SEQ ID NO: 20032 - protein, 11 aa, Homo sapiens
  Table A; HLA-A*23:01; SMAD4; G352V; 0
VYVDPSGGDRF

SEQ ID NO: 20033 - protein, 11 aa, Homo sapiens
  Table A; HLA-A*24:02; SMAD4; G352V; 1
VYVDPSGGDRF

SEQ ID NO: 20034 - protein, 11 aa, Homo sapiens
  Table A; HLA-A*29:02; SMAD4; G352V; 0
VYVDPSGGDRF

SEQ ID NO: 20035 - protein, 11 aa, Homo sapiens
  Table A; HLA-A*31:01; SMAD4; G352V; 0
VYVDPSGGDRF

SEQ ID NO: 20036 - protein, 11 aa, Homo sapiens
  Table A; HLA-A*33:03; SMAD4; G352V; 0
VYVDPSGGDRF

SEQ ID NO: 20037 - protein, 11 aa, Homo sapiens
  Table A; HLA-B*13:01; SMAD4; G352V; 0
VYVDPSGGDRF

SEQ ID NO: 20038 - protein, 11 aa, Homo sapiens
  Table A; HLA-B*15:03; SMAD4; G352V; 0
VYVDPSGGDRF

SEQ ID NO: 20039 - protein, 11 aa, Homo sapiens
  Table A; HLA-B*35:01; SMAD4; G352V; 1
VYVDPSGGDRF

SEQ ID NO: 20040 - protein, 11 aa, Homo sapiens
  Table A; HLA-B*38:01; SMAD4; G352V; 0
VYVDPSGGDRF

SEQ ID NO: 20041 - protein, 11 aa, Homo sapiens
  Table A; HLA-B*39:01; SMAD4; G352V; 0
VYVDPSGGDRF

SEQ ID NO: 20042 - protein, 11 aa, Homo sapiens
  Table A; HLA-B*44:05; SMAD4; G352V; 0
VYVDPSGGDRF

SEQ ID NO: 20043 - protein, 11 aa, Homo sapiens
  Table A; HLA-B*48:01; SMAD4; G352V; 0
VYVDPSGGDRF

SEQ ID NO: 20044 - protein, 11 aa, Homo sapiens
  Table A; HLA-C*08:03; SMAD4; G352V; 0
VYVDPSGGDRF

SEQ ID NO: 20045 - protein, 11 aa, Homo sapiens
  Table A; HLA-C*14:02; SMAD4; G352V; 0
VYVDPSGGDRF

SEQ ID NO: 20046 - protein, 11 aa, Homo sapiens
  Table A; HLA-C*14:03; SMAD4; G352V; 0
VYVDPSGGDRF

SEQ ID NO: 20047 - protein, 9 aa, Homo sapiens
  Table A; HLA-C*03:04; CSMD3; R2601Q; 1
WACDRGFQL

SEQ ID NO: 20048 - protein, 9 aa, Homo sapiens
  Table A; HLA-A*02:03; PIK3CA; R93W; 0
WLFQPFLKV

SEQ ID NO: 20049 - protein, 9 aa, Homo sapiens
  Table A; HLA-A*02:04; PIK3CA; R93W; 0
WLFQPFLKV

SEQ ID NO: 20050 - protein, 9 aa, Homo sapiens
  Table A; HLA-A*02:07; PIK3CA; R93W; 0
WLFQPFLKV

SEQ ID NO: 20051 - protein, 9 aa, Homo sapiens
  Table A; HLA-B*54:01; FGFR2; S252W; 0
WPHRPILQA

SEQ ID NO: 20052 - protein, 9 aa, Homo sapiens
  Table A; HLA-B*35:01; TP53; R249W; 0
WPILTIITL

SEQ ID NO: 20053 - protein, 9 aa, Homo sapiens
  Table A; HLA-B*35:03; TP53; R249W; 0
WPILTIITL

SEQ ID NO: 20054 - protein, 9 aa, Homo sapiens
  Table A; HLA-B*51:01; TP53; R249W; 0
WPILTIITL

SEQ ID NO: 20055 - protein, 9 aa, Homo sapiens
  Table A; HLA-B*54:01; TP53; R249W; 0
WPILTIITL

SEQ ID NO: 20056 - protein, 9 aa, Homo sapiens
  Table A; HLA-B*15:01; CTNNB1; S33F; 1
WQQQSYLDF

SEQ ID NO: 20057 - protein, 9 aa, Homo sapiens
  Table A; HLA-B*15:01; CTNNB1; S33Y; 1
WQQQSYLDY

SEQ ID NO: 20058 - protein, 9 aa, Homo sapiens
  Table A; HLA-B*15:02; CTNNB1; S33Y; 0
WQQQSYLDY

SEQ ID NO: 20059 - protein, 9 aa, Homo sapiens
  Table A; HLA-B*15:03; CTNNB1; S33Y; 0
WQQQSYLDY

SEQ ID NO: 20060 - protein, 8 aa, Homo sapiens
  Table A; HLA-B*13:02; CTNNB1; D32V; 1
WQQQSYLV

SEQ ID NO: 20061 - protein, 8 aa, Homo sapiens
  Table A; HLA-B*39:01; CTNNB1; D32V; 0
WQQQSYLV

SEQ ID NO: 20062 - protein, 8 aa, Homo sapiens
  Table A; HLA-B*39:06; CTNNB1; D32V; 0
WQQQSYLV

SEQ ID NO: 20063 - protein, 8 aa, Homo sapiens
  Table A; HLA-A*30:02; CTNNB1; D32Y; 0
WQQQSYLY

SEQ ID NO: 20064 - protein, 8 aa, Homo sapiens
  Table A; HLA-B*15:01; CTNNB1; D32Y; 1
WQQQSYLY

SEQ ID NO: 20065 - protein, 8 aa, Homo sapiens
  Table A; HLA-B*15:02; CTNNB1; D32Y; 0
WQQQSYLY

SEQ ID NO: 20066 - protein, 8 aa, Homo sapiens
  Table A; HLA-B*15:03; CTNNB1; D32Y; 0
WQQQSYLY

SEQ ID NO: 20067 - protein, 8 aa, Homo sapiens
  Table A; HLA-B*27:02; CTNNB1; D32Y; 0
WQQQSYLY

SEQ ID NO: 20068 - protein, 8 aa, Homo sapiens
  Table A; HLA-B*39:01; CTNNB1; D32Y; 0
WQQQSYLY

SEQ ID NO: 20069 - protein, 9 aa, Homo sapiens
  Table A; HLA-B*39:06; NFE2L2; D29G; 0
WRQDIGLGV

SEQ ID NO: 20070 - protein, 9 aa, Homo sapiens
  Table A; HLA-A*02:03; IDH1; R132L; 0
WVKPIIIGL

SEQ ID NO: 20071 - protein, 9 aa, Homo sapiens
  Table A; HLA-A*02:04; IDH1; R132L; 0
WVKPIIIGL

SEQ ID NO: 20072 - protein, 8 aa, Homo sapiens
  Table A; HLA-B*15:02; CTCF; K365T; 0
YASVEVST

SEQ ID NO: 20073 - protein, 8 aa, Homo sapiens
  Table A; HLA-B*35:02; CTCF; K365T; 0
YASVEVST

SEQ ID NO: 20074 - protein, 8 aa, Homo sapiens
  Table A; HLA-B*35:08; CTCF; K365T; 0
YASVEVST

SEQ ID NO: 20075 - protein, 8 aa, Homo sapiens
  Table A; HLA-B*35:12; CTCF; K365T; 0
YASVEVST

SEQ ID NO: 20076 - protein, 9 aa, Homo sapiens
  Table A; HLA-A*02:01; CTCF; K365T; 1
YASVEVSTL

SEQ ID NO: 20077 - protein, 9 aa, Homo sapiens
  Table A; HLA-A*02:03; CTCF; K365T; 0
YASVEVSTL

SEQ ID NO: 20078 - protein, 9 aa, Homo sapiens
  Table A; HLA-A*02:04; CTCF; K365T; 0
YASVEVSTL

SEQ ID NO: 20079 - protein, 9 aa, Homo sapiens
  Table A; HLA-A*02:05; CTCF; K365T; 0
YASVEVSTL

SEQ ID NO: 20080 - protein, 9 aa, Homo sapiens
  Table A; HLA-A*02:06; CTCF; K365T; 0
YASVEVSTL

SEQ ID NO: 20081 - protein, 9 aa, Homo sapiens
  Table A; HLA-A*25:01; CTCF; K365T; 0
YASVEVSTL

SEQ ID NO: 20082 - protein, 9 aa, Homo sapiens
  Table A; HLA-A*30:01; CTCF; K365T; 0
YASVEVSTL

SEQ ID NO: 20083 - protein, 9 aa, Homo sapiens
  Table A; HLA-A*68:01; CTCF; K365T; 0
YASVEVSTL

SEQ ID NO: 20084 - protein, 9 aa, Homo sapiens
  Table A; HLA-A*68:02; CTCF; K365T; 0
YASVEVSTL

SEQ ID NO: 20085 - protein, 9 aa, Homo sapiens
  Table A; HLA-B*07:02; CTCF; K365T; 1
YASVEVSTL

SEQ ID NO: 20086 - protein, 9 aa, Homo sapiens
  Table A; HLA-B*08:01; CTCF; K365T; 1
YASVEVSTL

SEQ ID NO: 20087 - protein, 9 aa, Homo sapiens
  Table A; HLA-B*15:01; CTCF; K365T; 1
YASVEVSTL

SEQ ID NO: 20088 - protein, 9 aa, Homo sapiens
  Table A; HLA-B*15:02; CTCF; K365T; 0
YASVEVSTL

SEQ ID NO: 20089 - protein, 9 aa, Homo sapiens
  Table A; HLA-B*15:10; CTCF; K365T; 0
YASVEVSTL

SEQ ID NO: 20090 - protein, 9 aa, Homo sapiens
  Table A; HLA-B*15:13; CTCF; K365T; 0
YASVEVSTL

SEQ ID NO: 20091 - protein, 9 aa, Homo sapiens
  Table A; HLA-B*35:01; CTCF; K365T; 1
YASVEVSTL

SEQ ID NO: 20092 - protein, 9 aa, Homo sapiens
  Table A; HLA-B*35:02; CTCF; K365T; 0
YASVEVSTL

SEQ ID NO: 20093 - protein, 9 aa, Homo sapiens
  Table A; HLA-B*35:03; CTCF; K365T; 0
YASVEVSTL

SEQ ID NO: 20094 - protein, 9 aa, Homo sapiens
  Table A; HLA-B*35:08; CTCF; K365T; 0
YASVEVSTL

SEQ ID NO: 20095 - protein, 9 aa, Homo sapiens
  Table A; HLA-B*35:12; CTCF; K365T; 0
YASVEVSTL

SEQ ID NO: 20096 - protein, 9 aa, Homo sapiens
  Table A; HLA-B*38:01; CTCF; K365T; 0
YASVEVSTL

SEQ ID NO: 20097 - protein, 9 aa, Homo sapiens
  Table A; HLA-B*39:01; CTCF; K365T; 0
YASVEVSTL

SEQ ID NO: 20098 - protein, 9 aa, Homo sapiens
  Table A; HLA-B*40:01; CTCF; K365T; 1
YASVEVSTL

SEQ ID NO: 20099 - protein, 9 aa, Homo sapiens
  Table A; HLA-B*40:02; CTCF; K365T; 0
YASVEVSTL

SEQ ID NO: 20100 - protein, 9 aa, Homo sapiens
  Table A; HLA-B*44:05; CTCF; K365T; 0
YASVEVSTL

SEQ ID NO: 20101 - protein, 9 aa, Homo sapiens
  Table A; HLA-B*46:01; CTCF; K365T; 0
YASVEVSTL

SEQ ID NO: 20102 - protein, 9 aa, Homo sapiens
  Table A; HLA-B*48:01; CTCF; K365T; 0
YASVEVSTL

SEQ ID NO: 20103 - protein, 9 aa, Homo sapiens
  Table A; HLA-B*50:01; CTCF; K365T; 0
YASVEVSTL

SEQ ID NO: 20104 - protein, 9 aa, Homo sapiens
  Table A; HLA-B*51:01; CTCF; K365T; 1
YASVEVSTL

SEQ ID NO: 20105 - protein, 9 aa, Homo sapiens
  Table A; HLA-B*54:01; CTCF; K365T; 0
YASVEVSTL

SEQ ID NO: 20106 - protein, 9 aa, Homo sapiens
  Table A; HLA-B*57:01; CTCF; K365T; 0
YASVEVSTL

SEQ ID NO: 20107 - protein, 9 aa, Homo sapiens
  Table A; HLA-B*58:01; CTCF; K365T; 0
YASVEVSTL

SEQ ID NO: 20108 - protein, 9 aa, Homo sapiens
  Table A; HLA-C*01:02; CTCF; K365T; 0
YASVEVSTL

SEQ ID NO: 20109 - protein, 9 aa, Homo sapiens
  Table A; HLA-C*02:02; CTCF; K365T; 0
YASVEVSTL

SEQ ID NO: 20110 - protein, 9 aa, Homo sapiens
  Table A; HLA-C*03:02; CTCF; K365T; 0
YASVEVSTL

SEQ ID NO: 20111 - protein, 9 aa, Homo sapiens
  Table A; HLA-C*03:03; CTCF; K365T; 1
YASVEVSTL

SEQ ID NO: 20112 - protein, 9 aa, Homo sapiens
  Table A; HLA-C*03:04; CTCF; K365T; 1
YASVEVSTL

SEQ ID NO: 20113 - protein, 9 aa, Homo sapiens
  Table A; HLA-C*05:01; CTCF; K365T; 1
YASVEVSTL

SEQ ID NO: 20114 - protein, 9 aa, Homo sapiens
  Table A; HLA-C*07:04; CTCF; K365T; 0
YASVEVSTL

SEQ ID NO: 20115 - protein, 9 aa, Homo sapiens
  Table A; HLA-C*08:01; CTCF; K365T; 0
YASVEVSTL

SEQ ID NO: 20116 - protein, 9 aa, Homo sapiens
  Table A; HLA-C*08:02; CTCF; K365T; 0
YASVEVSTL

SEQ ID NO: 20117 - protein, 9 aa, Homo sapiens
  Table A; HLA-C*08:03; CTCF; K365T; 0
YASVEVSTL

SEQ ID NO: 20118 - protein, 9 aa, Homo sapiens
  Table A; HLA-C*12:03; CTCF; K365T; 1
YASVEVSTL

SEQ ID NO: 20119 - protein, 9 aa, Homo sapiens
  Table A; HLA-C*14:03; CTCF; K365T; 0
YASVEVSTL

SEQ ID NO: 20120 - protein, 9 aa, Homo sapiens
  Table A; HLA-C*15:02; CTCF; K365T; 0
YASVEVSTL

SEQ ID NO: 20121 - protein, 9 aa, Homo sapiens
  Table A; HLA-C*16:01; CTCF; K365T; 0
YASVEVSTL

SEQ ID NO: 20122 - protein, 9 aa, Homo sapiens
  Table A; HLA-C*16:02; CTCF; K365T; 0
YASVEVSTL

SEQ ID NO: 20123 - protein, 9 aa, Homo sapiens
  Table A; HLA-C*16:04; CTCF; K365T; 0
YASVEVSTL

SEQ ID NO: 20124 - protein, 9 aa, Homo sapiens
  Table A; HLA-C*17:01; CTCF; K365T; 0
YASVEVSTL

SEQ ID NO: 20125 - protein, 10 aa, Homo sapiens
  Table A; HLA-A*68:01; CTCF; K365T; 0
YASVEVSTLK

SEQ ID NO: 20126 - protein, 10 aa, Homo sapiens
  Table A; HLA-A*68:02; CTCF; K365T; 0
YASVEVSTLK

SEQ ID NO: 20127 - protein, 10 aa, Homo sapiens
  Table A; HLA-B*27:02; CTCF; K365T; 0
YASVEVSTLK

SEQ ID NO: 20128 - protein, 11 aa, Homo sapiens
  Table A; HLA-A*68:01; CTCF; K365T; 0
YASVEVSTLKR

SEQ ID NO: 20129 - protein, 11 aa, Homo sapiens
  Table A; HLA-B*27:02; CTCF; K365T; 0
YASVEVSTLKR

SEQ ID NO: 20130 - protein, 8 aa, Homo sapiens
  Table A; HLA-B*35:01; KEAP1; G480W; 0
YAVGGFDW

SEQ ID NO: 20131 - protein, 8 aa, Homo sapiens
  Table A; HLA-B*54:01; KEAP1; G480W; 0
YAVGGFDW

SEQ ID NO: 20132 - protein, 8 aa, Homo sapiens
  Table A; HLA-B*57:01; KEAP1; G480W; 0
YAVGGFDW

SEQ ID NO: 20133 - protein, 8 aa, Homo sapiens
  Table A; HLA-B*58:01; KEAP1; G480W; 0
YAVGGFDW

SEQ ID NO: 20134 - protein, 8 aa, Homo sapiens
  Table A; HLA-C*16:01; KEAP1; G480W; 0
YAVGGFDW

SEQ ID NO: 20135 - protein, 8 aa, Homo sapiens
  Table A; HLA-B*54:01; CDKN2A; D108Y; 0
YAWGRLPV

SEQ ID NO: 20136 - protein, 10 aa, Homo sapiens
  Table A; HLA-A*02:07; CDKN2A; D108Y; 0
YAWGRLPVDL

SEQ ID NO: 20137 - protein, 11 aa, Homo sapiens
  Table A; HLA-B*54:01; CDKN2A; D108Y; 0
YAWGRLPVDLA

SEQ ID NO: 20138 - protein, 8 aa, Homo sapiens
  Table A; HLA-B*37:01; CDKN2A; H83Y; 0
YDAAREGF

SEQ ID NO: 20139 - protein, 8 aa, Homo sapiens
  Table A; HLA-B*41:02; CDKN2A; H83Y; 0
YDAAREGF

SEQ ID NO: 20140 - protein, 8 aa, Homo sapiens
  Table A; HLA-A*23:01; DCAF12L2; R378H; 0
YDIHAQKF

SEQ ID NO: 20141 - protein, 8 aa, Homo sapiens
  Table A; HLA-B*18:01; DCAF12L2; R378H; 0
YDIHAQKF

SEQ ID NO: 20142 - protein, 8 aa, Homo sapiens
  Table A; HLA-B*27:05; DCAF12L2; R378H; 0
YDIHAQKF

SEQ ID NO: 20143 - protein, 8 aa, Homo sapiens
  Table A; HLA-B*37:01; DCAF12L2; R378H; 0
YDIHAQKF

SEQ ID NO: 20144 - protein, 8 aa, Homo sapiens
  Table A; HLA-B*40:02; DCAF12L2; R378H; 0
YDIHAQKF

SEQ ID NO: 20145 - protein, 8 aa, Homo sapiens
  Table A; HLA-B*41:02; DCAF12L2; R378H; 0
YDIHAQKF

SEQ ID NO: 20146 - protein, 8 aa, Homo sapiens
  Table A; HLA-B*44:03; DCAF12L2; R378H; 0
YDIHAQKF

SEQ ID NO: 20147 - protein, 8 aa, Homo sapiens
  Table A; HLA-B*44:05; DCAF12L2; R378H; 0
YDIHAQKF

SEQ ID NO: 20148 - protein, 9 aa, Homo sapiens
  Table A; HLA-B*37:01; CSMD3; S300F; 0
YDYLEIEGF

SEQ ID NO: 20149 - protein, 9 aa, Homo sapiens
  Table A; HLA-B*49:01; MB21D2; Q311E; 0
YEACKAIII

SEQ ID NO: 20150 - protein, 8 aa, Homo sapiens
  Table A; HLA-B*40:02; CTNNB1; K335I; 0
YEILLWTT

SEQ ID NO: 20151 - protein, 8 aa, Homo sapiens
  Table A; HLA-B*50:01; CTNNB1; K335I; 0
YEILLWTT

SEQ ID NO: 20152 - protein, 8 aa, Homo sapiens
  Table A; HLA-B*54:01; CTNNB1; K335I; 0
YEILLWTT

SEQ ID NO: 20153 - protein, 9 aa, Homo sapiens
  Table A; HLA-B*49:01; CTNNB1; K335I; 0
YEILLWTTS

SEQ ID NO: 20154 - protein, 9 aa, Homo sapiens
  Table A; HLA-B*50:01; CTNNB1; K335I; 0
YEILLWTTS

SEQ ID NO: 20155 - protein, 10 aa, Homo sapiens
  Table A; HLA-A*30:01; TP53; H179Y; 0
YERCSDSDGL

SEQ ID NO: 20156 - protein, 10 aa, Homo sapiens
  Table A; HLA-B*40:01; TP53; H179Y; 0
YERCSDSDGL

SEQ ID NO: 20157 - protein, 9 aa, Homo sapiens
  Table A; HLA-B*15:01; MYCN; P44L; 1
YFGGPDSTL

SEQ ID NO: 20158 - protein, 9 aa, Homo sapiens
  Table A; HLA-B*35:03; MYCN; P44L; 0
YFGGPDSTL

SEQ ID NO: 20159 - protein, 9 aa, Homo sapiens
  Table A; HLA-B*39:01; MYCN; P44L; 0
YFGGPDSTL

SEQ ID NO: 20160 - protein, 9 aa, Homo sapiens
  Table A; HLA-B*40:02; MYCN; P44L; 0
YFGGPDSTL

SEQ ID NO: 20161 - protein, 9 aa, Homo sapiens
  Table A; HLA-B*48:01; MYCN; P44L; 0
YFGGPDSTL

SEQ ID NO: 20162 - protein, 9 aa, Homo sapiens
  Table A; HLA-C*01:02; MYCN; P44L; 0
YFGGPDSTL

SEQ ID NO: 20163 - protein, 9 aa, Homo sapiens
  Table A; HLA-C*14:02; MYCN; P44L; 0
YFGGPDSTL

SEQ ID NO: 20164 - protein, 9 aa, Homo sapiens
  Table A; HLA-C*14:03; MYCN; P44L; 0
YFGGPDSTL

SEQ ID NO: 20165 - protein, 10 aa, Homo sapiens
  Table A; HLA-C*14:02; PIK3CA; H1047L; 0
YFMKQMNDAL

SEQ ID NO: 20166 - protein, 10 aa, Homo sapiens
  Table A; HLA-A*29:01; PIK3CA; H1047Y; 0
YFMKQMNDAY

SEQ ID NO: 20167 - protein, 10 aa, Homo sapiens
  Table A; HLA-A*29:02; PIK3CA; H1047Y; 0
YFMKQMNDAY

SEQ ID NO: 20168 - protein, 10 aa, Homo sapiens
  Table A; HLA-C*14:02; PIK3CA; H1047Y; 0
YFMKQMNDAY

SEQ ID NO: 20169 - protein, 8 aa, Homo sapiens
  Table A; HLA-C*14:02; TP53; S127F; 0
YFPALNKM

SEQ ID NO: 20170 - protein, 9 aa, Homo sapiens
  Table A; HLA-A*23:01; TP53; S127F; 0
YFPALNKMF

SEQ ID NO: 20171 - protein, 9 aa, Homo sapiens
  Table A; HLA-A*24:02; TP53; S127F; 1
YFPALNKMF

SEQ ID NO: 20172 - protein, 9 aa, Homo sapiens
  Table A; HLA-C*14:02; TP53; S127F; 0
YFPALNKMF

SEQ ID NO: 20173 - protein, 8 aa, Homo sapiens
  Table A; HLA-B*15:01; FBXW7; R465H; 1
YGHTSTVH

SEQ ID NO: 20174 - protein, 8 aa, Homo sapiens
  Table A; HLA-B*48:01; FBXW7; R465H; 0
YGHTSTVH

SEQ ID NO: 20175 - protein, 8 aa, Homo sapiens
  Table A; HLA-A*02:01; CTNNB1; S33Y; 1
YGIHSGAT

SEQ ID NO: 20176 - protein, 8 aa, Homo sapiens
  Table A; HLA-B*15:01; CTNNB1; S33Y; 1
YGIHSGAT

SEQ ID NO: 20177 - protein, 8 aa, Homo sapiens
  Table A; HLA-B*39:01; CTNNB1; S33Y; 0
YGIHSGAT

SEQ ID NO: 20178 - protein, 8 aa, Homo sapiens
  Table A; HLA-B*48:01; CTNNB1; S33Y; 0
YGIHSGAT

SEQ ID NO: 20179 - protein, 8 aa, Homo sapiens
  Table A; HLA-C*08:03; CTNNB1; S33Y; 0
YGIHSGAT

SEQ ID NO: 20180 - protein, 9 aa, Homo sapiens
  Table A; HLA-A*02:05; CTNNB1; S33Y; 0
YGIHSGATT

SEQ ID NO: 20181 - protein, 9 aa, Homo sapiens
  Table A; HLA-B*08:01; CTNNB1; S33Y; 1
YGIHSGATT

SEQ ID NO: 20182 - protein, 9 aa, Homo sapiens
  Table A; HLA-B*15:10; CTNNB1; S33Y; 0
YGIHSGATT

SEQ ID NO: 20183 - protein, 9 aa, Homo sapiens
  Table A; HLA-B*35:03; CTNNB1; S33Y; 0
YGIHSGATT

SEQ ID NO: 20184 - protein, 9 aa, Homo sapiens
  Table A; HLA-B*39:01; CTNNB1; S33Y; 0
YGIHSGATT

SEQ ID NO: 20185 - protein, 9 aa, Homo sapiens
  Table A; HLA-B*48:01; CTNNB1; S33Y; 0
YGIHSGATT

SEQ ID NO: 20186 - protein, 9 aa, Homo sapiens
  Table A; HLA-B*54:01; CTNNB1; S33Y; 0
YGIHSGATT

SEQ ID NO: 20187 - protein, 9 aa, Homo sapiens
  Table A; HLA-C*08:01; CTNNB1; S33Y; 0
YGIHSGATT

SEQ ID NO: 20188 - protein, 10 aa, Homo sapiens
  Table A; HLA-A*68:02; CTNNB1; S33Y; 0
YGIHSGATTT

SEQ ID NO: 20189 - protein, 10 aa, Homo sapiens
  Table A; HLA-B*08:01; CTNNB1; S33Y; 1
YGIHSGATTT

SEQ ID NO: 20190 - protein, 10 aa, Homo sapiens
  Table A; HLA-B*39:01; CTNNB1; S33Y; 0
YGIHSGATTT

SEQ ID NO: 20191 - protein, 10 aa, Homo sapiens
  Table A; HLA-B*48:01; CTNNB1; S33Y; 0
YGIHSGATTT

SEQ ID NO: 20192 - protein, 10 aa, Homo sapiens
  Table A; HLA-C*08:03; CTNNB1; S33Y; 0
YGIHSGATTT

SEQ ID NO: 20193 - protein, 11 aa, Homo sapiens
  Table A; HLA-A*02:01; CTNNB1; S33Y; 1
YGIHSGATTTA

SEQ ID NO: 20194 - protein, 11 aa, Homo sapiens
  Table A; HLA-A*02:03; CTNNB1; S33Y; 0
YGIHSGATTTA

SEQ ID NO: 20195 - protein, 11 aa, Homo sapiens
  Table A; HLA-A*02:05; CTNNB1; S33Y; 0
YGIHSGATTTA

SEQ ID NO: 20196 - protein, 11 aa, Homo sapiens
  Table A; HLA-A*68:01; CTNNB1; S33Y; 0
YGIHSGATTTA

SEQ ID NO: 20197 - protein, 11 aa, Homo sapiens
  Table A; HLA-A*68:02; CTNNB1; S33Y; 0
YGIHSGATTTA

SEQ ID NO: 20198 - protein, 11 aa, Homo sapiens
  Table A; HLA-B*08:01; CTNNB1; S33Y; 1
YGIHSGATTTA

SEQ ID NO: 20199 - protein, 11 aa, Homo sapiens
  Table A; HLA-B*15:01; CTNNB1; S33Y; 1
YGIHSGATTTA

SEQ ID NO: 20200 - protein, 11 aa, Homo sapiens
  Table A; HLA-B*39:01; CTNNB1; S33Y; 0
YGIHSGATTTA

SEQ ID NO: 20201 - protein, 11 aa, Homo sapiens
  Table A; HLA-B*46:01; CTNNB1; S33Y; 0
YGIHSGATTTA

SEQ ID NO: 20202 - protein, 11 aa, Homo sapiens
  Table A; HLA-B*48:01; CTNNB1; S33Y; 0
YGIHSGATTTA

SEQ ID NO: 20203 - protein, 11 aa, Homo sapiens
  Table A; HLA-B*50:01; CTNNB1; S33Y; 0
YGIHSGATTTA

SEQ ID NO: 20204 - protein, 11 aa, Homo sapiens
  Table A; HLA-B*54:01; CTNNB1; S33Y; 0
YGIHSGATTTA

SEQ ID NO: 20205 - protein, 11 aa, Homo sapiens
  Table A; HLA-C*08:03; CTNNB1; S33Y; 0
YGIHSGATTTA

SEQ ID NO: 20206 - protein, 9 aa, Homo sapiens
  Table A; HLA-B*15:10; PIK3CA; H1047Y; 0
YHGGWTTKM

SEQ ID NO: 20207 - protein, 9 aa, Homo sapiens
  Table A; HLA-B*38:01; PIK3CA; H1047Y; 0
YHGGWTTKM

SEQ ID NO: 20208 - protein, 9 aa, Homo sapiens
  Table A; HLA-A*29:02; GRIN2A; S1425L; 0
YILEHVMPY

SEQ ID NO: 20209 - protein, 9 aa, Homo sapiens
  Table A; HLA-B*15:02; GRIN2A; S1425L; 0
YILEHVMPY

SEQ ID NO: 20210 - protein, 11 aa, Homo sapiens
  Table A; HLA-A*01:01; ARHGAP5; V474A; 1
YITEADSKEAY

SEQ ID NO: 20211 - protein, 11 aa, Homo sapiens
  Table A; HLA-A*26:01; ARHGAP5; V474A; 0
YITEADSKEAY

SEQ ID NO: 20212 - protein, 11 aa, Homo sapiens
  Table A; HLA-B*15:01; ARHGAP5; V474A; 1
YITEADSKEAY

SEQ ID NO: 20213 - protein, 11 aa, Homo sapiens
  Table A; HLA-B*15:02; ARHGAP5; V474A; 0
YITEADSKEAY

SEQ ID NO: 20214 - protein, 11 aa, Homo sapiens
  Table A; HLA-B*35:01; ARHGAP5; V474A; 1
YITEADSKEAY

SEQ ID NO: 20215 - protein, 11 aa, Homo sapiens
  Table A; HLA-B*35:08; ARHGAP5; V474A; 0
YITEADSKEAY

SEQ ID NO: 20216 - protein, 11 aa, Homo sapiens
  Table A; HLA-B*39:01; ARHGAP5; V474A; 0
YITEADSKEAY

SEQ ID NO: 20217 - protein, 11 aa, Homo sapiens
  Table A; HLA-C*08:01; ARHGAP5; V474A; 0
YITEADSKEAY

SEQ ID NO: 20218 - protein, 9 aa, Homo sapiens
  Table A; HLA-B*15:03; BMP5; R208Q; 0
YKDRSNNQF

SEQ ID NO: 20219 - protein, 9 aa, Homo sapiens
  Table A; HLA-C*08:02; BMP5; R208Q; 0
YKDRSNNQF

SEQ ID NO: 20220 - protein, 9 aa, Homo sapiens
  Table A; HLA-B*39:06; KRAS; G12A; 0
YKLVVVGAA

SEQ ID NO: 20221 - protein, 9 aa, Homo sapiens
  Table A; HLA-B*15:10; STAG1; A116T; 0
YKQDRDITL

SEQ ID NO: 20222 - protein, 9 aa, Homo sapiens
  Table A; HLA-B*39:01; STAG1; A116T; 0
YKQDRDITL

SEQ ID NO: 20223 - protein, 9 aa, Homo sapiens
  Table A; HLA-B*41:02; STAG1; A116T; 0
YKQDRDITL

SEQ ID NO: 20224 - protein, 9 aa, Homo sapiens
  Table A; HLA-B*48:01; STAG1; A116T; 0
YKQDRDITL

SEQ ID NO: 20225 - protein, 9 aa, Homo sapiens
  Table A; HLA-A*02:01; CTNNB1; S33C; 1
YLDCGIHSG

SEQ ID NO: 20226 - protein, 10 aa, Homo sapiens
  Table A; HLA-A*02:01; CTNNB1; S33C; 1
YLDCGIHSGA

SEQ ID NO: 20227 - protein, 10 aa, Homo sapiens
  Table A; HLA-A*02:03; CTNNB1; S33C; 0
YLDCGIHSGA

SEQ ID NO: 20228 - protein, 10 aa, Homo sapiens
  Table A; HLA-A*02:07; CTNNB1; S33C; 0
YLDCGIHSGA

SEQ ID NO: 20229 - protein, 10 aa, Homo sapiens
  Table A; HLA-A*68:02; CTNNB1; S33C; 0
YLDCGIHSGA

SEQ ID NO: 20230 - protein, 9 aa, Homo sapiens
  Table A; HLA-A*02:01; TP53; R213Q; 1
YLDDRNTFQ

SEQ ID NO: 20231 - protein, 9 aa, Homo sapiens
  Table A; HLA-A*02:07; TP53; R213Q; 0
YLDDRNTFQ

SEQ ID NO: 20232 - protein, 9 aa, Homo sapiens
  Table A; HLA-A*02:01; CTNNB1; S33F; 1
YLDFGIHSG

SEQ ID NO: 20233 - protein, 9 aa, Homo sapiens
  Table A; HLA-A*02:04; CTNNB1; S33F; 0
YLDFGIHSG

SEQ ID NO: 20234 - protein, 9 aa, Homo sapiens
  Table A; HLA-A*02:07; CTNNB1; S33F; 0
YLDFGIHSG

SEQ ID NO: 20235 - protein, 10 aa, Homo sapiens
  Table A; HLA-A*01:01; CTNNB1; S33F; 1
YLDFGIHSGA

SEQ ID NO: 20236 - protein, 10 aa, Homo sapiens
  Table A; HLA-A*02:01; CTNNB1; S33F; 1
YLDFGIHSGA

SEQ ID NO: 20237 - protein, 10 aa, Homo sapiens
  Table A; HLA-A*02:03; CTNNB1; S33F; 0
YLDFGIHSGA

SEQ ID NO: 20238 - protein, 10 aa, Homo sapiens
  Table A; HLA-A*02:04; CTNNB1; S33F; 0
YLDFGIHSGA

SEQ ID NO: 20239 - protein, 10 aa, Homo sapiens
  Table A; HLA-A*02:05; CTNNB1; S33F; 0
YLDFGIHSGA

SEQ ID NO: 20240 - protein, 10 aa, Homo sapiens
  Table A; HLA-A*02:07; CTNNB1; S33F; 0
YLDFGIHSGA

SEQ ID NO: 20241 - protein, 10 aa, Homo sapiens
  Table A; HLA-A*29:02; CTNNB1; S33F; 1
YLDFGIHSGA

SEQ ID NO: 20242 - protein, 10 aa, Homo sapiens
  Table A; HLA-A*68:02; CTNNB1; S33F; 0
YLDFGIHSGA

SEQ ID NO: 20243 - protein, 10 aa, Homo sapiens
  Table A; HLA-B*13:02; CTNNB1; S33F; 1
YLDFGIHSGA

SEQ ID NO: 20244 - protein, 10 aa, Homo sapiens
  Table A; HLA-B*27:02; CTNNB1; S33F; 0
YLDFGIHSGA

SEQ ID NO: 20245 - protein, 10 aa, Homo sapiens
  Table A; HLA-B*48:01; CTNNB1; S33F; 0
YLDFGIHSGA

SEQ ID NO: 20246 - protein, 10 aa, Homo sapiens
  Table A; HLA-B*50:01; CTNNB1; S33F; 0
YLDFGIHSGA

SEQ ID NO: 20247 - protein, 10 aa, Homo sapiens
  Table A; HLA-B*54:01; CTNNB1; S33F; 0
YLDFGIHSGA

SEQ ID NO: 20248 - protein, 10 aa, Homo sapiens
  Table A; HLA-C*08:03; CTNNB1; S33F; 0
YLDFGIHSGA

SEQ ID NO: 20249 - protein, 11 aa, Homo sapiens
  Table A; HLA-A*02:01; CTNNB1; S33F; 1
YLDFGIHSGAT

SEQ ID NO: 20250 - protein, 11 aa, Homo sapiens
  Table A; HLA-B*48:01; CTNNB1; S33F; 0
YLDFGIHSGAT

SEQ ID NO: 20251 - protein, 9 aa, Homo sapiens
  Table A; HLA-A*02:01; CTNNB1; G34E; 1
YLDSEIHSG

SEQ ID NO: 20252 - protein, 9 aa, Homo sapiens
  Table A; HLA-A*02:04; CTNNB1; G34E; 0
YLDSEIHSG

SEQ ID NO: 20253 - protein, 9 aa, Homo sapiens
  Table A; HLA-A*02:06; CTNNB1; G34E; 0
YLDSEIHSG

SEQ ID NO: 20254 - protein, 9 aa, Homo sapiens
  Table A; HLA-A*02:07; CTNNB1; G34E; 0
YLDSEIHSG

SEQ ID NO: 20255 - protein, 9 aa, Homo sapiens
  Table A; HLA-B*39:01; CTNNB1; G34E; 0
YLDSEIHSG

SEQ ID NO: 20256 - protein, 9 aa, Homo sapiens
  Table A; HLA-C*08:02; CTNNB1; G34E; 0
YLDSEIHSG

SEQ ID NO: 20257 - protein, 10 aa, Homo sapiens
  Table A; HLA-A*01:01; CTNNB1; G34E; 1
YLDSEIHSGA

SEQ ID NO: 20258 - protein, 10 aa, Homo sapiens
  Table A; HLA-A*02:01; CTNNB1; G34E; 1
YLDSEIHSGA

SEQ ID NO: 20259 - protein, 10 aa, Homo sapiens
  Table A; HLA-A*02:03; CTNNB1; G34E; 0
YLDSEIHSGA

SEQ ID NO: 20260 - protein, 10 aa, Homo sapiens
  Table A; HLA-A*02:05; CTNNB1; G34E; 0
YLDSEIHSGA

SEQ ID NO: 20261 - protein, 10 aa, Homo sapiens
  Table A; HLA-A*02:06; CTNNB1; G34E; 0
YLDSEIHSGA

SEQ ID NO: 20262 - protein, 10 aa, Homo sapiens
  Table A; HLA-A*02:07; CTNNB1; G34E; 0
YLDSEIHSGA

SEQ ID NO: 20263 - protein, 10 aa, Homo sapiens
  Table A; HLA-A*03:02; CTNNB1; G34E; 0
YLDSEIHSGA

SEQ ID NO: 20264 - protein, 10 aa, Homo sapiens
  Table A; HLA-A*68:02; CTNNB1; G34E; 0
YLDSEIHSGA

SEQ ID NO: 20265 - protein, 10 aa, Homo sapiens
  Table A; HLA-B*13:02; CTNNB1; G34E; 0
YLDSEIHSGA

SEQ ID NO: 20266 - protein, 10 aa, Homo sapiens
  Table A; HLA-B*48:01; CTNNB1; G34E; 0
YLDSEIHSGA

SEQ ID NO: 20267 - protein, 10 aa, Homo sapiens
  Table A; HLA-B*50:01; CTNNB1; G34E; 0
YLDSEIHSGA

SEQ ID NO: 20268 - protein, 10 aa, Homo sapiens
  Table A; HLA-C*08:02; CTNNB1; G34E; 0
YLDSEIHSGA

SEQ ID NO: 20269 - protein, 10 aa, Homo sapiens
  Table A; HLA-C*08:03; CTNNB1; G34E; 0
YLDSEIHSGA

SEQ ID NO: 20270 - protein, 11 aa, Homo sapiens
  Table A; HLA-A*01:01; CTNNB1; G34E; 1
YLDSEIHSGAT

SEQ ID NO: 20271 - protein, 11 aa, Homo sapiens
  Table A; HLA-A*02:01; CTNNB1; G34E; 1
YLDSEIHSGAT

SEQ ID NO: 20272 - protein, 11 aa, Homo sapiens
  Table A; HLA-A*02:07; CTNNB1; G34E; 0
YLDSEIHSGAT

SEQ ID NO: 20273 - protein, 11 aa, Homo sapiens
  Table A; HLA-A*68:02; CTNNB1; G34E; 0
YLDSEIHSGAT

SEQ ID NO: 20274 - protein, 11 aa, Homo sapiens
  Table A; HLA-B*08:01; CTNNB1; G34E; 1
YLDSEIHSGAT

SEQ ID NO: 20275 - protein, 11 aa, Homo sapiens
  Table A; HLA-B*27:02; CTNNB1; G34E; 0
YLDSEIHSGAT

SEQ ID NO: 20276 - protein, 11 aa, Homo sapiens
  Table A; HLA-B*39:01; CTNNB1; G34E; 0
YLDSEIHSGAT

SEQ ID NO: 20277 - protein, 11 aa, Homo sapiens
  Table A; HLA-B*48:01; CTNNB1; G34E; 0
YLDSEIHSGAT

SEQ ID NO: 20278 - protein, 11 aa, Homo sapiens
  Table A; HLA-C*08:03; CTNNB1; G34E; 0
YLDSEIHSGAT

SEQ ID NO: 20279 - protein, 8 aa, Homo sapiens
  Table A; HLA-A*01:01; CTNNB1; S37A; 1
YLDSGIHA

SEQ ID NO: 20280 - protein, 8 aa, Homo sapiens
  Table A; HLA-A*02:01; CTNNB1; S37A; 1
YLDSGIHA

SEQ ID NO: 20281 - protein, 8 aa, Homo sapiens
  Table A; HLA-A*02:03; CTNNB1; S37A; 0
YLDSGIHA

SEQ ID NO: 20282 - protein, 8 aa, Homo sapiens
  Table A; HLA-A*02:07; CTNNB1; S37A; 0
YLDSGIHA

SEQ ID NO: 20283 - protein, 8 aa, Homo sapiens
  Table A; HLA-B*13:02; CTNNB1; S37A; 0
YLDSGIHA

SEQ ID NO: 20284 - protein, 8 aa, Homo sapiens
  Table A; HLA-B*35:03; CTNNB1; S37A; 0
YLDSGIHA

SEQ ID NO: 20285 - protein, 8 aa, Homo sapiens
  Table A; HLA-B*35:12; CTNNB1; S37A; 0
YLDSGIHA

SEQ ID NO: 20286 - protein, 8 aa, Homo sapiens
  Table A; HLA-B*38:01; CTNNB1; S37A; 0
YLDSGIHA

SEQ ID NO: 20287 - protein, 8 aa, Homo sapiens
  Table A; HLA-B*39:01; CTNNB1; S37A; 0
YLDSGIHA

SEQ ID NO: 20288 - protein, 8 aa, Homo sapiens
  Table A; HLA-B*58:01; CTNNB1; S37A; 0
YLDSGIHA

SEQ ID NO: 20289 - protein, 8 aa, Homo sapiens
  Table A; HLA-C*04:01; CTNNB1; S37A; 1
YLDSGIHA

SEQ ID NO: 20290 - protein, 8 aa, Homo sapiens
  Table A; HLA-C*05:01; CTNNB1; S37A; 1
YLDSGIHA

SEQ ID NO: 20291 - protein, 8 aa, Homo sapiens
  Table A; HLA-C*08:01; CTNNB1; S37A; 0
YLDSGIHA

SEQ ID NO: 20292 - protein, 8 aa, Homo sapiens
  Table A; HLA-C*08:02; CTNNB1; S37A; 0
YLDSGIHA

SEQ ID NO: 20293 - protein, 8 aa, Homo sapiens
  Table A; HLA-C*08:03; CTNNB1; S37A; 0
YLDSGIHA

SEQ ID NO: 20294 - protein, 9 aa, Homo sapiens
  Table A; HLA-A*01:01; CTNNB1; S37A; 1
YLDSGIHAG

SEQ ID NO: 20295 - protein, 9 aa, Homo sapiens
  Table A; HLA-A*02:01; CTNNB1; S37A; 1
YLDSGIHAG

SEQ ID NO: 20296 - protein, 9 aa, Homo sapiens
  Table A; HLA-A*02:03; CTNNB1; S37A; 0
YLDSGIHAG

SEQ ID NO: 20297 - protein, 9 aa, Homo sapiens
  Table A; HLA-A*02:04; CTNNB1; S37A; 0
YLDSGIHAG

SEQ ID NO: 20298 - protein, 9 aa, Homo sapiens
  Table A; HLA-A*02:06; CTNNB1; S37A; 0
YLDSGIHAG

SEQ ID NO: 20299 - protein, 9 aa, Homo sapiens
  Table A; HLA-A*02:07; CTNNB1; S37A; 0
YLDSGIHAG

SEQ ID NO: 20300 - protein, 9 aa, Homo sapiens
  Table A; HLA-A*31:01; CTNNB1; S37A; 0
YLDSGIHAG

SEQ ID NO: 20301 - protein, 9 aa, Homo sapiens
  Table A; HLA-A*68:02; CTNNB1; S37A; 0
YLDSGIHAG

SEQ ID NO: 20302 - protein, 9 aa, Homo sapiens
  Table A; HLA-B*08:01; CTNNB1; S37A; 1
YLDSGIHAG

SEQ ID NO: 20303 - protein, 9 aa, Homo sapiens
  Table A; HLA-B*13:02; CTNNB1; S37A; 0
YLDSGIHAG

SEQ ID NO: 20304 - protein, 9 aa, Homo sapiens
  Table A; HLA-B*39:01; CTNNB1; S37A; 0
YLDSGIHAG

SEQ ID NO: 20305 - protein, 9 aa, Homo sapiens
  Table A; HLA-B*48:01; CTNNB1; S37A; 0
YLDSGIHAG

SEQ ID NO: 20306 - protein, 9 aa, Homo sapiens
  Table A; HLA-C*08:02; CTNNB1; S37A; 0
YLDSGIHAG

SEQ ID NO: 20307 - protein, 10 aa, Homo sapiens
  Table A; HLA-A*01:01; CTNNB1; S37A; 1
YLDSGIHAGA

SEQ ID NO: 20308 - protein, 10 aa, Homo sapiens
  Table A; HLA-A*02:01; CTNNB1; S37A; 1
YLDSGIHAGA

SEQ ID NO: 20309 - protein, 10 aa, Homo sapiens
  Table A; HLA-A*02:03; CTNNB1; S37A; 0
YLDSGIHAGA

SEQ ID NO: 20310 - protein, 10 aa, Homo sapiens
  Table A; HLA-A*02:04; CTNNB1; S37A; 0
YLDSGIHAGA

SEQ ID NO: 20311 - protein, 10 aa, Homo sapiens
  Table A; HLA-A*02:05; CTNNB1; S37A; 0
YLDSGIHAGA

SEQ ID NO: 20312 - protein, 10 aa, Homo sapiens
  Table A; HLA-A*02:06; CTNNB1; S37A; 0
YLDSGIHAGA

SEQ ID NO: 20313 - protein, 10 aa, Homo sapiens
  Table A; HLA-A*02:07; CTNNB1; S37A; 0
YLDSGIHAGA

SEQ ID NO: 20314 - protein, 10 aa, Homo sapiens
  Table A; HLA-A*02:08; CTNNB1; S37A; 0
YLDSGIHAGA

SEQ ID NO: 20315 - protein, 10 aa, Homo sapiens
  Table A; HLA-A*03:01; CTNNB1; S37A; 1
YLDSGIHAGA

SEQ ID NO: 20316 - protein, 10 aa, Homo sapiens
  Table A; HLA-A*03:02; CTNNB1; S37A; 0
YLDSGIHAGA

SEQ ID NO: 20317 - protein, 10 aa, Homo sapiens
  Table A; HLA-A*11:01; CTNNB1; S37A; 1
YLDSGIHAGA

SEQ ID NO: 20318 - protein, 10 aa, Homo sapiens
  Table A; HLA-A*26:03; CTNNB1; S37A; 0
YLDSGIHAGA

SEQ ID NO: 20319 - protein, 10 aa, Homo sapiens
  Table A; HLA-A*29:02; CTNNB1; S37A; 0
YLDSGIHAGA

SEQ ID NO: 20320 - protein, 10 aa, Homo sapiens
  Table A; HLA-A*31:01; CTNNB1; S37A; 0
YLDSGIHAGA

SEQ ID NO: 20321 - protein, 10 aa, Homo sapiens
  Table A; HLA-A*68:01; CTNNB1; S37A; 0
YLDSGIHAGA

SEQ ID NO: 20322 - protein, 10 aa, Homo sapiens
  Table A; HLA-A*68:02; CTNNB1; S37A; 0
YLDSGIHAGA

SEQ ID NO: 20323 - protein, 10 aa, Homo sapiens
  Table A; HLA-B*08:01; CTNNB1; S37A; 1
YLDSGIHAGA

SEQ ID NO: 20324 - protein, 10 aa, Homo sapiens
  Table A; HLA-B*13:02; CTNNB1; S37A; 0
YLDSGIHAGA

SEQ ID NO: 20325 - protein, 10 aa, Homo sapiens
  Table A; HLA-B*27:02; CTNNB1; S37A; 0
YLDSGIHAGA

SEQ ID NO: 20326 - protein, 10 aa, Homo sapiens
  Table A; HLA-B*27:05; CTNNB1; S37A; 0
YLDSGIHAGA

SEQ ID NO: 20327 - protein, 10 aa, Homo sapiens
  Table A; HLA-B*39:01; CTNNB1; S37A; 0
YLDSGIHAGA

SEQ ID NO: 20328 - protein, 10 aa, Homo sapiens
  Table A; HLA-B*39:06; CTNNB1; S37A; 0
YLDSGIHAGA

SEQ ID NO: 20329 - protein, 10 aa, Homo sapiens
  Table A; HLA-B*40:02; CTNNB1; S37A; 0
YLDSGIHAGA

SEQ ID NO: 20330 - protein, 10 aa, Homo sapiens
  Table A; HLA-B*48:01; CTNNB1; S37A; 0
YLDSGIHAGA

SEQ ID NO: 20331 - protein, 10 aa, Homo sapiens
  Table A; HLA-B*50:01; CTNNB1; S37A; 0
YLDSGIHAGA

SEQ ID NO: 20332 - protein, 10 aa, Homo sapiens
  Table A; HLA-B*54:01; CTNNB1; S37A; 0
YLDSGIHAGA

SEQ ID NO: 20333 - protein, 10 aa, Homo sapiens
  Table A; HLA-C*08:01; CTNNB1; S37A; 0
YLDSGIHAGA

SEQ ID NO: 20334 - protein, 10 aa, Homo sapiens
  Table A; HLA-C*08:02; CTNNB1; S37A; 0
YLDSGIHAGA

SEQ ID NO: 20335 - protein, 10 aa, Homo sapiens
  Table A; HLA-C*08:03; CTNNB1; S37A; 0
YLDSGIHAGA

SEQ ID NO: 20336 - protein, 11 aa, Homo sapiens
  Table A; HLA-A*01:01; CTNNB1; S37A; 1
YLDSGIHAGAT

SEQ ID NO: 20337 - protein, 11 aa, Homo sapiens
  Table A; HLA-A*02:01; CTNNB1; S37A; 1
YLDSGIHAGAT

SEQ ID NO: 20338 - protein, 11 aa, Homo sapiens
  Table A; HLA-B*27:02; CTNNB1; S37A; 0
YLDSGIHAGAT

SEQ ID NO: 20339 - protein, 11 aa, Homo sapiens
  Table A; HLA-B*48:01; CTNNB1; S37A; 0
YLDSGIHAGAT

SEQ ID NO: 20340 - protein, 11 aa, Homo sapiens
  Table A; HLA-C*08:03; CTNNB1; S37A; 0
YLDSGIHAGAT

SEQ ID NO: 20341 - protein, 8 aa, Homo sapiens
  Table A; HLA-A*02:01; CTNNB1; S37C; 1
YLDSGIHC

SEQ ID NO: 20342 - protein, 8 aa, Homo sapiens
  Table A; HLA-A*02:07; CTNNB1; S37C; 0
YLDSGIHC

SEQ ID NO: 20343 - protein, 8 aa, Homo sapiens
  Table A; HLA-B*39:01; CTNNB1; S37C; 0
YLDSGIHC

SEQ ID NO: 20344 - protein, 8 aa, Homo sapiens
  Table A; HLA-B*48:01; CTNNB1; S37C; 0
YLDSGIHC

SEQ ID NO: 20345 - protein, 8 aa, Homo sapiens
  Table A; HLA-C*05:01; CTNNB1; S37C; 1
YLDSGIHC

SEQ ID NO: 20346 - protein, 8 aa, Homo sapiens
  Table A; HLA-C*08:01; CTNNB1; S37C; 0
YLDSGIHC

SEQ ID NO: 20347 - protein, 8 aa, Homo sapiens
  Table A; HLA-C*08:02; CTNNB1; S37C; 1
YLDSGIHC

SEQ ID NO: 20348 - protein, 9 aa, Homo sapiens
  Table A; HLA-A*02:01; CTNNB1; S37C; 1
YLDSGIHCG

SEQ ID NO: 20349 - protein, 9 aa, Homo sapiens
  Table A; HLA-A*02:03; CTNNB1; S37C; 0
YLDSGIHCG

SEQ ID NO: 20350 - protein, 9 aa, Homo sapiens
  Table A; HLA-A*02:04; CTNNB1; S37C; 0
YLDSGIHCG

SEQ ID NO: 20351 - protein, 9 aa, Homo sapiens
  Table A; HLA-A*02:06; CTNNB1; S37C; 0
YLDSGIHCG

SEQ ID NO: 20352 - protein, 9 aa, Homo sapiens
  Table A; HLA-A*02:07; CTNNB1; S37C; 0
YLDSGIHCG

SEQ ID NO: 20353 - protein, 9 aa, Homo sapiens
  Table A; HLA-A*31:01; CTNNB1; S37C; 1
YLDSGIHCG

SEQ ID NO: 20354 - protein, 9 aa, Homo sapiens
  Table A; HLA-A*68:02; CTNNB1; S37C; 0
YLDSGIHCG

SEQ ID NO: 20355 - protein, 9 aa, Homo sapiens
  Table A; HLA-B*08:01; CTNNB1; S37C; 1
YLDSGIHCG

SEQ ID NO: 20356 - protein, 9 aa, Homo sapiens
  Table A; HLA-B*13:02; CTNNB1; S37C; 1
YLDSGIHCG

SEQ ID NO: 20357 - protein, 9 aa, Homo sapiens
  Table A; HLA-B*38:01; CTNNB1; S37C; 1
YLDSGIHCG

SEQ ID NO: 20358 - protein, 9 aa, Homo sapiens
  Table A; HLA-B*39:01; CTNNB1; S37C; 0
YLDSGIHCG

SEQ ID NO: 20359 - protein, 9 aa, Homo sapiens
  Table A; HLA-B*48:01; CTNNB1; S37C; 0
YLDSGIHCG

SEQ ID NO: 20360 - protein, 10 aa, Homo sapiens
  Table A; HLA-A*01:01; CTNNB1; S37C; 1
YLDSGIHCGA

SEQ ID NO: 20361 - protein, 10 aa, Homo sapiens
  Table A; HLA-A*02:01; CTNNB1; S37C; 1
YLDSGIHCGA

SEQ ID NO: 20362 - protein, 10 aa, Homo sapiens
  Table A; HLA-A*02:03; CTNNB1; S37C; 0
YLDSGIHCGA

SEQ ID NO: 20363 - protein, 10 aa, Homo sapiens
  Table A; HLA-A*02:04; CTNNB1; S37C; 0
YLDSGIHCGA

SEQ ID NO: 20364 - protein, 10 aa, Homo sapiens
  Table A; HLA-A*02:05; CTNNB1; S37C; 0
YLDSGIHCGA

SEQ ID NO: 20365 - protein, 10 aa, Homo sapiens
  Table A; HLA-A*02:06; CTNNB1; S37C; 0
YLDSGIHCGA

SEQ ID NO: 20366 - protein, 10 aa, Homo sapiens
  Table A; HLA-A*02:07; CTNNB1; S37C; 0
YLDSGIHCGA

SEQ ID NO: 20367 - protein, 10 aa, Homo sapiens
  Table A; HLA-A*03:01; CTNNB1; S37C; 1
YLDSGIHCGA

SEQ ID NO: 20368 - protein, 10 aa, Homo sapiens
  Table A; HLA-A*03:02; CTNNB1; S37C; 0
YLDSGIHCGA

SEQ ID NO: 20369 - protein, 10 aa, Homo sapiens
  Table A; HLA-A*68:02; CTNNB1; S37C; 0
YLDSGIHCGA

SEQ ID NO: 20370 - protein, 10 aa, Homo sapiens
  Table A; HLA-B*13:02; CTNNB1; S37C; 1
YLDSGIHCGA

SEQ ID NO: 20371 - protein, 10 aa, Homo sapiens
  Table A; HLA-B*39:06; CTNNB1; S37C; 0
YLDSGIHCGA

SEQ ID NO: 20372 - protein, 10 aa, Homo sapiens
  Table A; HLA-B*48:01; CTNNB1; S37C; 0
YLDSGIHCGA

SEQ ID NO: 20373 - protein, 10 aa, Homo sapiens
  Table A; HLA-B*50:01; CTNNB1; S37C; 0
YLDSGIHCGA

SEQ ID NO: 20374 - protein, 10 aa, Homo sapiens
  Table A; HLA-B*54:01; CTNNB1; S37C; 0
YLDSGIHCGA

SEQ ID NO: 20375 - protein, 10 aa, Homo sapiens
  Table A; HLA-C*08:03; CTNNB1; S37C; 0
YLDSGIHCGA

SEQ ID NO: 20376 - protein, 8 aa, Homo sapiens
  Table A; HLA-A*01:01; CTNNB1; S37F; 1
YLDSGIHF

SEQ ID NO: 20377 - protein, 8 aa, Homo sapiens
  Table A; HLA-A*02:01; CTNNB1; S37F; 1
YLDSGIHF

SEQ ID NO: 20378 - protein, 8 aa, Homo sapiens
  Table A; HLA-A*02:04; CTNNB1; S37F; 0
YLDSGIHF

SEQ ID NO: 20379 - protein, 8 aa, Homo sapiens
  Table A; HLA-A*02:07; CTNNB1; S37F; 0
YLDSGIHF

SEQ ID NO: 20380 - protein, 8 aa, Homo sapiens
  Table A; HLA-A*11:01; CTNNB1; S37F; 1
YLDSGIHF

SEQ ID NO: 20381 - protein, 8 aa, Homo sapiens
  Table A; HLA-A*23:01; CTNNB1; S37F; 1
YLDSGIHF

SEQ ID NO: 20382 - protein, 8 aa, Homo sapiens
  Table A; HLA-B*08:01; CTNNB1; S37F; 1
YLDSGIHF

SEQ ID NO: 20383 - protein, 8 aa, Homo sapiens
  Table A; HLA-B*13:01; CTNNB1; S37F; 0
YLDSGIHF

SEQ ID NO: 20384 - protein, 8 aa, Homo sapiens
  Table A; HLA-B*15:01; CTNNB1; S37F; 1
YLDSGIHF

SEQ ID NO: 20385 - protein, 8 aa, Homo sapiens
  Table A; HLA-B*15:13; CTNNB1; S37F; 0
YLDSGIHF

SEQ ID NO: 20386 - protein, 8 aa, Homo sapiens
  Table A; HLA-B*35:01; CTNNB1; S37F; 1
YLDSGIHF

SEQ ID NO: 20387 - protein, 8 aa, Homo sapiens
  Table A; HLA-B*35:03; CTNNB1; S37F; 0
YLDSGIHF

SEQ ID NO: 20388 - protein, 8 aa, Homo sapiens
  Table A; HLA-B*35:08; CTNNB1; S37F; 0
YLDSGIHF

SEQ ID NO: 20389 - protein, 8 aa, Homo sapiens
  Table A; HLA-B*37:01; CTNNB1; S37F; 0
YLDSGIHF

SEQ ID NO: 20390 - protein, 8 aa, Homo sapiens
  Table A; HLA-B*38:01; CTNNB1; S37F; 1
YLDSGIHF

SEQ ID NO: 20391 - protein, 8 aa, Homo sapiens
  Table A; HLA-B*39:01; CTNNB1; S37F; 0
YLDSGIHF

SEQ ID NO: 20392 - protein, 8 aa, Homo sapiens
  Table A; HLA-B*44:05; CTNNB1; S37F; 0
YLDSGIHF

SEQ ID NO: 20393 - protein, 8 aa, Homo sapiens
  Table A; HLA-B*58:01; CTNNB1; S37F; 0
YLDSGIHF

SEQ ID NO: 20394 - protein, 8 aa, Homo sapiens
  Table A; HLA-C*02:02; CTNNB1; S37F; 1
YLDSGIHF

SEQ ID NO: 20395 - protein, 8 aa, Homo sapiens
  Table A; HLA-C*03:02; CTNNB1; S37F; 0
YLDSGIHF

SEQ ID NO: 20396 - protein, 8 aa, Homo sapiens
  Table A; HLA-C*03:03; CTNNB1; S37F; 1
YLDSGIHF

SEQ ID NO: 20397 - protein, 8 aa, Homo sapiens
  Table A; HLA-C*03:04; CTNNB1; S37F; 1
YLDSGIHF

SEQ ID NO: 20398 - protein, 8 aa, Homo sapiens
  Table A; HLA-C*04:01; CTNNB1; S37F; 1
YLDSGIHF

SEQ ID NO: 20399 - protein, 8 aa, Homo sapiens
  Table A; HLA-C*05:01; CTNNB1; S37F; 1
YLDSGIHF

SEQ ID NO: 20400 - protein, 8 aa, Homo sapiens
  Table A; HLA-C*08:01; CTNNB1; S37F; 0
YLDSGIHF

SEQ ID NO: 20401 - protein, 8 aa, Homo sapiens
  Table A; HLA-C*08:02; CTNNB1; S37F; 1
YLDSGIHF

SEQ ID NO: 20402 - protein, 8 aa, Homo sapiens
  Table A; HLA-C*15:02; CTNNB1; S37F; 1
YLDSGIHF

SEQ ID NO: 20403 - protein, 8 aa, Homo sapiens
  Table A; HLA-C*16:01; CTNNB1; S37F; 1
YLDSGIHF

SEQ ID NO: 20404 - protein, 8 aa, Homo sapiens
  Table A; HLA-C*17:01; CTNNB1; S37F; 0
YLDSGIHF

SEQ ID NO: 20405 - protein, 9 aa, Homo sapiens
  Table A; HLA-A*01:01; CTNNB1; S37F; 1
YLDSGIHFG

SEQ ID NO: 20406 - protein, 9 aa, Homo sapiens
  Table A; HLA-A*02:01; CTNNB1; S37F; 1
YLDSGIHFG

SEQ ID NO: 20407 - protein, 9 aa, Homo sapiens
  Table A; HLA-A*02:04; CTNNB1; S37F; 0
YLDSGIHFG

SEQ ID NO: 20408 - protein, 9 aa, Homo sapiens
  Table A; HLA-A*02:07; CTNNB1; S37F; 0
YLDSGIHFG

SEQ ID NO: 20409 - protein, 9 aa, Homo sapiens
  Table A; HLA-A*68:02; CTNNB1; S37F; 0
YLDSGIHFG

SEQ ID NO: 20410 - protein, 10 aa, Homo sapiens
  Table A; HLA-A*01:01; CTNNB1; S37F; 1
YLDSGIHFGA

SEQ ID NO: 20411 - protein, 10 aa, Homo sapiens
  Table A; HLA-A*02:01; CTNNB1; S37F; 1
YLDSGIHFGA

SEQ ID NO: 20412 - protein, 10 aa, Homo sapiens
  Table A; HLA-A*02:03; CTNNB1; S37F; 0
YLDSGIHFGA

SEQ ID NO: 20413 - protein, 10 aa, Homo sapiens
  Table A; HLA-A*02:04; CTNNB1; S37F; 0
YLDSGIHFGA

SEQ ID NO: 20414 - protein, 10 aa, Homo sapiens
  Table A; HLA-A*02:05; CTNNB1; S37F; 0
YLDSGIHFGA

SEQ ID NO: 20415 - protein, 10 aa, Homo sapiens
  Table A; HLA-A*02:06; CTNNB1; S37F; 0
YLDSGIHFGA

SEQ ID NO: 20416 - protein, 10 aa, Homo sapiens
  Table A; HLA-A*02:07; CTNNB1; S37F; 0
YLDSGIHFGA

SEQ ID NO: 20417 - protein, 10 aa, Homo sapiens
  Table A; HLA-A*03:01; CTNNB1; S37F; 1
YLDSGIHFGA

SEQ ID NO: 20418 - protein, 10 aa, Homo sapiens
  Table A; HLA-A*03:02; CTNNB1; S37F; 0
YLDSGIHFGA

SEQ ID NO: 20419 - protein, 10 aa, Homo sapiens
  Table A; HLA-A*29:02; CTNNB1; S37F; 1
YLDSGIHFGA

SEQ ID NO: 20420 - protein, 10 aa, Homo sapiens
  Table A; HLA-A*31:01; CTNNB1; S37F; 1
YLDSGIHFGA

SEQ ID NO: 20421 - protein, 10 aa, Homo sapiens
  Table A; HLA-A*68:02; CTNNB1; S37F; 0
YLDSGIHFGA

SEQ ID NO: 20422 - protein, 10 aa, Homo sapiens
  Table A; HLA-B*08:01; CTNNB1; S37F; 1
YLDSGIHFGA

SEQ ID NO: 20423 - protein, 10 aa, Homo sapiens
  Table A; HLA-B*13:02; CTNNB1; S37F; 1
YLDSGIHFGA

SEQ ID NO: 20424 - protein, 10 aa, Homo sapiens
  Table A; HLA-B*27:02; CTNNB1; S37F; 0
YLDSGIHFGA

SEQ ID NO: 20425 - protein, 10 aa, Homo sapiens
  Table A; HLA-B*48:01; CTNNB1; S37F; 0
YLDSGIHFGA

SEQ ID NO: 20426 - protein, 10 aa, Homo sapiens
  Table A; HLA-B*50:01; CTNNB1; S37F; 0
YLDSGIHFGA

SEQ ID NO: 20427 - protein, 10 aa, Homo sapiens
  Table A; HLA-B*54:01; CTNNB1; S37F; 0
YLDSGIHFGA

SEQ ID NO: 20428 - protein, 11 aa, Homo sapiens
  Table A; HLA-A*02:07; CTNNB1; S37F; 0
YLDSGIHFGAT

SEQ ID NO: 20429 - protein, 11 aa, Homo sapiens
  Table A; HLA-A*68:02; CTNNB1; S37F; 0
YLDSGIHFGAT

SEQ ID NO: 20430 - protein, 8 aa, Homo sapiens
  Table A; HLA-C*08:03; CTNNB1; S37P; 0
YLDSGIHP

SEQ ID NO: 20431 - protein, 9 aa, Homo sapiens
  Table A; HLA-A*01:01; CTNNB1; S37P; 1
YLDSGIHPG

SEQ ID NO: 20432 - protein, 9 aa, Homo sapiens
  Table A; HLA-A*02:01; CTNNB1; S37P; 1
YLDSGIHPG

SEQ ID NO: 20433 - protein, 9 aa, Homo sapiens
  Table A; HLA-A*02:03; CTNNB1; S37P; 0
YLDSGIHPG

SEQ ID NO: 20434 - protein, 9 aa, Homo sapiens
  Table A; HLA-A*02:04; CTNNB1; S37P; 0
YLDSGIHPG

SEQ ID NO: 20435 - protein, 9 aa, Homo sapiens
  Table A; HLA-A*02:06; CTNNB1; S37P; 0
YLDSGIHPG

SEQ ID NO: 20436 - protein, 9 aa, Homo sapiens
  Table A; HLA-A*02:07; CTNNB1; S37P; 0
YLDSGIHPG

SEQ ID NO: 20437 - protein, 9 aa, Homo sapiens
  Table A; HLA-A*31:01; CTNNB1; S37P; 0
YLDSGIHPG

SEQ ID NO: 20438 - protein, 9 aa, Homo sapiens
  Table A; HLA-A*68:02; CTNNB1; S37P; 0
YLDSGIHPG

SEQ ID NO: 20439 - protein, 9 aa, Homo sapiens
  Table A; HLA-B*08:01; CTNNB1; S37P; 1
YLDSGIHPG

SEQ ID NO: 20440 - protein, 9 aa, Homo sapiens
  Table A; HLA-B*39:01; CTNNB1; S37P; 0
YLDSGIHPG

SEQ ID NO: 20441 - protein, 9 aa, Homo sapiens
  Table A; HLA-B*48:01; CTNNB1; S37P; 0
YLDSGIHPG

SEQ ID NO: 20442 - protein, 9 aa, Homo sapiens
  Table A; HLA-B*54:01; CTNNB1; S37P; 0
YLDSGIHPG

SEQ ID NO: 20443 - protein, 9 aa, Homo sapiens
  Table A; HLA-C*08:02; CTNNB1; S37P; 0
YLDSGIHPG

SEQ ID NO: 20444 - protein, 10 aa, Homo sapiens
  Table A; HLA-A*01:01; CTNNB1; S37P; 1
YLDSGIHPGA

SEQ ID NO: 20445 - protein, 10 aa, Homo sapiens
  Table A; HLA-A*02:01; CTNNB1; S37P; 1
YLDSGIHPGA

SEQ ID NO: 20446 - protein, 10 aa, Homo sapiens
  Table A; HLA-A*02:03; CTNNB1; S37P; 0
YLDSGIHPGA

SEQ ID NO: 20447 - protein, 10 aa, Homo sapiens
  Table A; HLA-A*02:04; CTNNB1; S37P; 0
YLDSGIHPGA

SEQ ID NO: 20448 - protein, 10 aa, Homo sapiens
  Table A; HLA-A*02:05; CTNNB1; S37P; 0
YLDSGIHPGA

SEQ ID NO: 20449 - protein, 10 aa, Homo sapiens
  Table A; HLA-A*02:06; CTNNB1; S37P; 0
YLDSGIHPGA

SEQ ID NO: 20450 - protein, 10 aa, Homo sapiens
  Table A; HLA-A*02:07; CTNNB1; S37P; 0
YLDSGIHPGA

SEQ ID NO: 20451 - protein, 10 aa, Homo sapiens
  Table A; HLA-A*02:08; CTNNB1; S37P; 0
YLDSGIHPGA

SEQ ID NO: 20452 - protein, 10 aa, Homo sapiens
  Table A; HLA-A*03:01; CTNNB1; S37P; 1
YLDSGIHPGA

SEQ ID NO: 20453 - protein, 10 aa, Homo sapiens
  Table A; HLA-A*03:02; CTNNB1; S37P; 0
YLDSGIHPGA

SEQ ID NO: 20454 - protein, 10 aa, Homo sapiens
  Table A; HLA-A*68:01; CTNNB1; S37P; 0
YLDSGIHPGA

SEQ ID NO: 20455 - protein, 10 aa, Homo sapiens
  Table A; HLA-A*68:02; CTNNB1; S37P; 0
YLDSGIHPGA

SEQ ID NO: 20456 - protein, 10 aa, Homo sapiens
  Table A; HLA-B*08:01; CTNNB1; S37P; 1
YLDSGIHPGA

SEQ ID NO: 20457 - protein, 10 aa, Homo sapiens
  Table A; HLA-B*13:02; CTNNB1; S37P; 0
YLDSGIHPGA

SEQ ID NO: 20458 - protein, 10 aa, Homo sapiens
  Table A; HLA-B*39:01; CTNNB1; S37P; 0
YLDSGIHPGA

SEQ ID NO: 20459 - protein, 10 aa, Homo sapiens
  Table A; HLA-B*39:06; CTNNB1; S37P; 0
YLDSGIHPGA

SEQ ID NO: 20460 - protein, 10 aa, Homo sapiens
  Table A; HLA-B*48:01; CTNNB1; S37P; 0
YLDSGIHPGA

SEQ ID NO: 20461 - protein, 10 aa, Homo sapiens
  Table A; HLA-B*50:01; CTNNB1; S37P; 0
YLDSGIHPGA

SEQ ID NO: 20462 - protein, 10 aa, Homo sapiens
  Table A; HLA-B*54:01; CTNNB1; S37P; 0
YLDSGIHPGA

SEQ ID NO: 20463 - protein, 10 aa, Homo sapiens
  Table A; HLA-C*08:01; CTNNB1; S37P; 0
YLDSGIHPGA

SEQ ID NO: 20464 - protein, 10 aa, Homo sapiens
  Table A; HLA-C*08:02; CTNNB1; S37P; 0
YLDSGIHPGA

SEQ ID NO: 20465 - protein, 11 aa, Homo sapiens
  Table A; HLA-A*01:01; CTNNB1; S37P; 1
YLDSGIHPGAT

SEQ ID NO: 20466 - protein, 11 aa, Homo sapiens
  Table A; HLA-A*02:01; CTNNB1; S37P; 1
YLDSGIHPGAT

SEQ ID NO: 20467 - protein, 11 aa, Homo sapiens
  Table A; HLA-B*39:01; CTNNB1; S37P; 0
YLDSGIHPGAT

SEQ ID NO: 20468 - protein, 11 aa, Homo sapiens
  Table A; HLA-B*48:01; CTNNB1; S37P; 0
YLDSGIHPGAT

SEQ ID NO: 20469 - protein, 9 aa, Homo sapiens
  Table A; HLA-A*02:01; CTNNB1; G34R; 1
YLDSRIHSG

SEQ ID NO: 20470 - protein, 9 aa, Homo sapiens
  Table A; HLA-A*02:04; CTNNB1; G34R; 0
YLDSRIHSG

SEQ ID NO: 20471 - protein, 9 aa, Homo sapiens
  Table A; HLA-A*02:07; CTNNB1; G34R; 0
YLDSRIHSG

SEQ ID NO: 20472 - protein, 9 aa, Homo sapiens
  Table A; HLA-B*08:01; CTNNB1; G34R; 1
YLDSRIHSG

SEQ ID NO: 20473 - protein, 10 aa, Homo sapiens
  Table A; HLA-A*02:01; CTNNB1; G34R; 1
YLDSRIHSGA

SEQ ID NO: 20474 - protein, 10 aa, Homo sapiens
  Table A; HLA-A*02:03; CTNNB1; G34R; 0
YLDSRIHSGA

SEQ ID NO: 20475 - protein, 10 aa, Homo sapiens
  Table A; HLA-A*02:07; CTNNB1; G34R; 0
YLDSRIHSGA

SEQ ID NO: 20476 - protein, 10 aa, Homo sapiens
  Table A; HLA-A*03:01; CTNNB1; G34R; 1
YLDSRIHSGA

SEQ ID NO: 20477 - protein, 10 aa, Homo sapiens
  Table A; HLA-A*31:01; CTNNB1; G34R; 1
YLDSRIHSGA

SEQ ID NO: 20478 - protein, 10 aa, Homo sapiens
  Table A; HLA-B*48:01; CTNNB1; G34R; 0
YLDSRIHSGA

SEQ ID NO: 20479 - protein, 11 aa, Homo sapiens
  Table A; HLA-B*08:01; CTNNB1; G34R; 1
YLDSRIHSGAT

SEQ ID NO: 20480 - protein, 9 aa, Homo sapiens
  Table A; HLA-A*01:01; CTNNB1; G34V; 1
YLDSVIHSG

SEQ ID NO: 20481 - protein, 9 aa, Homo sapiens
  Table A; HLA-A*02:01; CTNNB1; G34V; 1
YLDSVIHSG

SEQ ID NO: 20482 - protein, 9 aa, Homo sapiens
  Table A; HLA-A*02:04; CTNNB1; G34V; 0
YLDSVIHSG

SEQ ID NO: 20483 - protein, 9 aa, Homo sapiens
  Table A; HLA-A*02:06; CTNNB1; G34V; 0
YLDSVIHSG

SEQ ID NO: 20484 - protein, 9 aa, Homo sapiens
  Table A; HLA-A*02:07; CTNNB1; G34V; 0
YLDSVIHSG

SEQ ID NO: 20485 - protein, 9 aa, Homo sapiens
  Table A; HLA-A*31:01; CTNNB1; G34V; 0
YLDSVIHSG

SEQ ID NO: 20486 - protein, 9 aa, Homo sapiens
  Table A; HLA-A*68:02; CTNNB1; G34V; 0
YLDSVIHSG

SEQ ID NO: 20487 - protein, 9 aa, Homo sapiens
  Table A; HLA-B*13:02; CTNNB1; G34V; 0
YLDSVIHSG

SEQ ID NO: 20488 - protein, 9 aa, Homo sapiens
  Table A; HLA-C*08:02; CTNNB1; G34V; 1
YLDSVIHSG

SEQ ID NO: 20489 - protein, 10 aa, Homo sapiens
  Table A; HLA-A*01:01; CTNNB1; G34V; 1
YLDSVIHSGA

SEQ ID NO: 20490 - protein, 10 aa, Homo sapiens
  Table A; HLA-A*02:01; CTNNB1; G34V; 1
YLDSVIHSGA

SEQ ID NO: 20491 - protein, 10 aa, Homo sapiens
  Table A; HLA-A*02:03; CTNNB1; G34V; 0
YLDSVIHSGA

SEQ ID NO: 20492 - protein, 10 aa, Homo sapiens
  Table A; HLA-A*02:05; CTNNB1; G34V; 0
YLDSVIHSGA

SEQ ID NO: 20493 - protein, 10 aa, Homo sapiens
  Table A; HLA-A*02:06; CTNNB1; G34V; 0
YLDSVIHSGA

SEQ ID NO: 20494 - protein, 10 aa, Homo sapiens
  Table A; HLA-A*02:07; CTNNB1; G34V; 0
YLDSVIHSGA

SEQ ID NO: 20495 - protein, 10 aa, Homo sapiens
  Table A; HLA-A*03:01; CTNNB1; G34V; 1
YLDSVIHSGA

SEQ ID NO: 20496 - protein, 10 aa, Homo sapiens
  Table A; HLA-A*03:02; CTNNB1; G34V; 0
YLDSVIHSGA

SEQ ID NO: 20497 - protein, 10 aa, Homo sapiens
  Table A; HLA-A*68:02; CTNNB1; G34V; 0
YLDSVIHSGA

SEQ ID NO: 20498 - protein, 10 aa, Homo sapiens
  Table A; HLA-B*27:02; CTNNB1; G34V; 0
YLDSVIHSGA

SEQ ID NO: 20499 - protein, 10 aa, Homo sapiens
  Table A; HLA-B*48:01; CTNNB1; G34V; 0
YLDSVIHSGA

SEQ ID NO: 20500 - protein, 10 aa, Homo sapiens
  Table A; HLA-B*54:01; CTNNB1; G34V; 0
YLDSVIHSGA

SEQ ID NO: 20501 - protein, 11 aa, Homo sapiens
  Table A; HLA-A*01:01; CTNNB1; G34V; 1
YLDSVIHSGAT

SEQ ID NO: 20502 - protein, 11 aa, Homo sapiens
  Table A; HLA-A*02:01; CTNNB1; G34V; 1
YLDSVIHSGAT

SEQ ID NO: 20503 - protein, 11 aa, Homo sapiens
  Table A; HLA-A*02:07; CTNNB1; G34V; 0
YLDSVIHSGAT

SEQ ID NO: 20504 - protein, 11 aa, Homo sapiens
  Table A; HLA-A*68:02; CTNNB1; G34V; 0
YLDSVIHSGAT

SEQ ID NO: 20505 - protein, 11 aa, Homo sapiens
  Table A; HLA-B*08:01; CTNNB1; G34V; 1
YLDSVIHSGAT

SEQ ID NO: 20506 - protein, 11 aa, Homo sapiens
  Table A; HLA-B*48:01; CTNNB1; G34V; 0
YLDSVIHSGAT

SEQ ID NO: 20507 - protein, 11 aa, Homo sapiens
  Table A; HLA-C*08:03; CTNNB1; G34V; 0
YLDSVIHSGAT

SEQ ID NO: 20508 - protein, 9 aa, Homo sapiens
  Table A; HLA-A*01:01; CTNNB1; S33Y; 1
YLDYGIHSG

SEQ ID NO: 20509 - protein, 9 aa, Homo sapiens
  Table A; HLA-A*02:01; CTNNB1; S33Y; 1
YLDYGIHSG

SEQ ID NO: 20510 - protein, 9 aa, Homo sapiens
  Table A; HLA-A*02:07; CTNNB1; S33Y; 0
YLDYGIHSG

SEQ ID NO: 20511 - protein, 10 aa, Homo sapiens
  Table A; HLA-A*01:01; CTNNB1; S33Y; 1
YLDYGIHSGA

SEQ ID NO: 20512 - protein, 10 aa, Homo sapiens
  Table A; HLA-A*02:01; CTNNB1; S33Y; 1
YLDYGIHSGA

SEQ ID NO: 20513 - protein, 10 aa, Homo sapiens
  Table A; HLA-A*02:03; CTNNB1; S33Y; 0
YLDYGIHSGA

SEQ ID NO: 20514 - protein, 10 aa, Homo sapiens
  Table A; HLA-A*02:04; CTNNB1; S33Y; 0
YLDYGIHSGA

SEQ ID NO: 20515 - protein, 10 aa, Homo sapiens
  Table A; HLA-A*02:05; CTNNB1; S33Y; 0
YLDYGIHSGA

SEQ ID NO: 20516 - protein, 10 aa, Homo sapiens
  Table A; HLA-A*02:06; CTNNB1; S33Y; 0
YLDYGIHSGA

SEQ ID NO: 20517 - protein, 10 aa, Homo sapiens
  Table A; HLA-A*02:07; CTNNB1; S33Y; 0
YLDYGIHSGA

SEQ ID NO: 20518 - protein, 10 aa, Homo sapiens
  Table A; HLA-A*03:01; CTNNB1; S33Y; 1
YLDYGIHSGA

SEQ ID NO: 20519 - protein, 10 aa, Homo sapiens
  Table A; HLA-A*03:02; CTNNB1; S33Y; 0
YLDYGIHSGA

SEQ ID NO: 20520 - protein, 10 aa, Homo sapiens
  Table A; HLA-A*68:02; CTNNB1; S33Y; 0
YLDYGIHSGA

SEQ ID NO: 20521 - protein, 10 aa, Homo sapiens
  Table A; HLA-B*13:02; CTNNB1; S33Y; 0
YLDYGIHSGA

SEQ ID NO: 20522 - protein, 10 aa, Homo sapiens
  Table A; HLA-B*27:02; CTNNB1; S33Y; 0
YLDYGIHSGA

SEQ ID NO: 20523 - protein, 10 aa, Homo sapiens
  Table A; HLA-B*48:01; CTNNB1; S33Y; 0
YLDYGIHSGA

SEQ ID NO: 20524 - protein, 10 aa, Homo sapiens
  Table A; HLA-B*50:01; CTNNB1; S33Y; 0
YLDYGIHSGA

SEQ ID NO: 20525 - protein, 10 aa, Homo sapiens
  Table A; HLA-B*54:01; CTNNB1; S33Y; 0
YLDYGIHSGA

SEQ ID NO: 20526 - protein, 11 aa, Homo sapiens
  Table A; HLA-A*02:01; CTNNB1; S33Y; 1
YLDYGIHSGAT

SEQ ID NO: 20527 - protein, 11 aa, Homo sapiens
  Table A; HLA-A*02:07; CTNNB1; S33Y; 0
YLDYGIHSGAT

SEQ ID NO: 20528 - protein, 10 aa, Homo sapiens
  Table A; HLA-A*26:03; RAC1; A159V; 0
YLECSVLTQR

SEQ ID NO: 20529 - protein, 10 aa, Homo sapiens
  Table A; HLA-A*68:01; RAC1; A159V; 0
YLECSVLTQR

SEQ ID NO: 20530 - protein, 10 aa, Homo sapiens
  Table A; HLA-B*27:02; RAC1; A159V; 0
YLECSVLTQR

SEQ ID NO: 20531 - protein, 8 aa, Homo sapiens
  Table A; HLA-A*02:03; ERBB2; V842I; 0
YLEDVRLI

SEQ ID NO: 20532 - protein, 8 aa, Homo sapiens
  Table A; HLA-A*02:04; ERBB2; V842I; 0
YLEDVRLI

SEQ ID NO: 20533 - protein, 10 aa, Homo sapiens
  Table A; HLA-A*02:04; ERBB2; V842I; 0
YLEDVRLIHR

SEQ ID NO: 20534 - protein, 10 aa, Homo sapiens
  Table A; HLA-A*02:07; ERBB2; V842I; 0
YLEDVRLIHR

SEQ ID NO: 20535 - protein, 9 aa, Homo sapiens
  Table A; HLA-A*02:04; FGFR2; C382R; 0
YLEIAIYRI

SEQ ID NO: 20536 - protein, 11 aa, Homo sapiens
  Table A; HLA-B*27:02; MAPK1; E322K; 0
YLEQYYDPSDK

SEQ ID NO: 20537 - protein, 9 aa, Homo sapiens
  Table A; HLA-A*02:01; CTNNB1; D32H; 1
YLHSGIHSG

SEQ ID NO: 20538 - protein, 9 aa, Homo sapiens
  Table A; HLA-A*02:03; CTNNB1; D32H; 0
YLHSGIHSG

SEQ ID NO: 20539 - protein, 9 aa, Homo sapiens
  Table A; HLA-A*02:04; CTNNB1; D32H; 0
YLHSGIHSG

SEQ ID NO: 20540 - protein, 9 aa, Homo sapiens
  Table A; HLA-A*02:07; CTNNB1; D32H; 0
YLHSGIHSG

SEQ ID NO: 20541 - protein, 9 aa, Homo sapiens
  Table A; HLA-A*26:03; CTNNB1; D32H; 0
YLHSGIHSG

SEQ ID NO: 20542 - protein, 9 aa, Homo sapiens
  Table A; HLA-A*31:01; CTNNB1; D32H; 0
YLHSGIHSG

SEQ ID NO: 20543 - protein, 9 aa, Homo sapiens
  Table A; HLA-A*33:01; CTNNB1; D32H; 0
YLHSGIHSG

SEQ ID NO: 20544 - protein, 9 aa, Homo sapiens
  Table A; HLA-A*68:02; CTNNB1; D32H; 0
YLHSGIHSG

SEQ ID NO: 20545 - protein, 9 aa, Homo sapiens
  Table A; HLA-B*08:01; CTNNB1; D32H; 1
YLHSGIHSG

SEQ ID NO: 20546 - protein, 9 aa, Homo sapiens
  Table A; HLA-B*13:02; CTNNB1; D32H; 0
YLHSGIHSG

SEQ ID NO: 20547 - protein, 9 aa, Homo sapiens
  Table A; HLA-B*46:01; CTNNB1; D32H; 0
YLHSGIHSG

SEQ ID NO: 20548 - protein, 9 aa, Homo sapiens
  Table A; HLA-B*54:01; CTNNB1; D32H; 0
YLHSGIHSG

SEQ ID NO: 20549 - protein, 10 aa, Homo sapiens
  Table A; HLA-A*02:01; CTNNB1; D32H; 1
YLHSGIHSGA

SEQ ID NO: 20550 - protein, 10 aa, Homo sapiens
  Table A; HLA-A*02:03; CTNNB1; D32H; 0
YLHSGIHSGA

SEQ ID NO: 20551 - protein, 10 aa, Homo sapiens
  Table A; HLA-A*02:04; CTNNB1; D32H; 0
YLHSGIHSGA

SEQ ID NO: 20552 - protein, 10 aa, Homo sapiens
  Table A; HLA-A*02:05; CTNNB1; D32H; 0
YLHSGIHSGA

SEQ ID NO: 20553 - protein, 10 aa, Homo sapiens
  Table A; HLA-A*02:07; CTNNB1; D32H; 0
YLHSGIHSGA

SEQ ID NO: 20554 - protein, 10 aa, Homo sapiens
  Table A; HLA-A*02:08; CTNNB1; D32H; 0
YLHSGIHSGA

SEQ ID NO: 20555 - protein, 10 aa, Homo sapiens
  Table A; HLA-A*03:01; CTNNB1; D32H; 1
YLHSGIHSGA

SEQ ID NO: 20556 - protein, 10 aa, Homo sapiens
  Table A; HLA-A*26:03; CTNNB1; D32H; 0
YLHSGIHSGA

SEQ ID NO: 20557 - protein, 10 aa, Homo sapiens
  Table A; HLA-A*30:01; CTNNB1; D32H; 0
YLHSGIHSGA

SEQ ID NO: 20558 - protein, 10 aa, Homo sapiens
  Table A; HLA-A*31:01; CTNNB1; D32H; 0
YLHSGIHSGA

SEQ ID NO: 20559 - protein, 10 aa, Homo sapiens
  Table A; HLA-A*68:02; CTNNB1; D32H; 0
YLHSGIHSGA

SEQ ID NO: 20560 - protein, 10 aa, Homo sapiens
  Table A; HLA-B*13:02; CTNNB1; D32H; 0
YLHSGIHSGA

SEQ ID NO: 20561 - protein, 10 aa, Homo sapiens
  Table A; HLA-B*15:01; CTNNB1; D32H; 0
YLHSGIHSGA

SEQ ID NO: 20562 - protein, 10 aa, Homo sapiens
  Table A; HLA-B*48:01; CTNNB1; D32H; 0
YLHSGIHSGA

SEQ ID NO: 20563 - protein, 10 aa, Homo sapiens
  Table A; HLA-B*50:01; CTNNB1; D32H; 0
YLHSGIHSGA

SEQ ID NO: 20564 - protein, 10 aa, Homo sapiens
  Table A; HLA-B*54:01; CTNNB1; D32H; 0
YLHSGIHSGA

SEQ ID NO: 20565 - protein, 10 aa, Homo sapiens
  Table A; HLA-C*08:03; CTNNB1; D32H; 0
YLHSGIHSGA

SEQ ID NO: 20566 - protein, 11 aa, Homo sapiens
  Table A; HLA-A*02:01; CTNNB1; D32H; 1
YLHSGIHSGAT

SEQ ID NO: 20567 - protein, 11 aa, Homo sapiens
  Table A; HLA-A*02:03; CTNNB1; D32H; 0
YLHSGIHSGAT

SEQ ID NO: 20568 - protein, 11 aa, Homo sapiens
  Table A; HLA-B*48:01; CTNNB1; D32H; 0
YLHSGIHSGAT

SEQ ID NO: 20569 - protein, 9 aa, Homo sapiens
  Table A; HLA-A*02:03; TP53; H193Y; 0
YLIRVEGNL

SEQ ID NO: 20570 - protein, 9 aa, Homo sapiens
  Table A; HLA-A*02:04; TP53; H193Y; 0
YLIRVEGNL

SEQ ID NO: 20571 - protein, 9 aa, Homo sapiens
  Table A; HLA-A*02:01; CTNNB1; D32N; 1
YLNSGIHSG

SEQ ID NO: 20572 - protein, 9 aa, Homo sapiens
  Table A; HLA-A*02:03; CTNNB1; D32N; 0
YLNSGIHSG

SEQ ID NO: 20573 - protein, 9 aa, Homo sapiens
  Table A; HLA-A*02:04; CTNNB1; D32N; 0
YLNSGIHSG

SEQ ID NO: 20574 - protein, 9 aa, Homo sapiens
  Table A; HLA-A*02:07; CTNNB1; D32N; 0
YLNSGIHSG

SEQ ID NO: 20575 - protein, 9 aa, Homo sapiens
  Table A; HLA-A*03:01; CTNNB1; D32N; 1
YLNSGIHSG

SEQ ID NO: 20576 - protein, 9 aa, Homo sapiens
  Table A; HLA-A*03:02; CTNNB1; D32N; 0
YLNSGIHSG

SEQ ID NO: 20577 - protein, 9 aa, Homo sapiens
  Table A; HLA-A*26:01; CTNNB1; D32N; 1
YLNSGIHSG

SEQ ID NO: 20578 - protein, 9 aa, Homo sapiens
  Table A; HLA-A*31:01; CTNNB1; D32N; 1
YLNSGIHSG

SEQ ID NO: 20579 - protein, 9 aa, Homo sapiens
  Table A; HLA-A*33:01; CTNNB1; D32N; 0
YLNSGIHSG

SEQ ID NO: 20580 - protein, 9 aa, Homo sapiens
  Table A; HLA-A*33:03; CTNNB1; D32N; 0
YLNSGIHSG

SEQ ID NO: 20581 - protein, 9 aa, Homo sapiens
  Table A; HLA-A*68:02; CTNNB1; D32N; 0
YLNSGIHSG

SEQ ID NO: 20582 - protein, 9 aa, Homo sapiens
  Table A; HLA-B*08:01; CTNNB1; D32N; 1
YLNSGIHSG

SEQ ID NO: 20583 - protein, 9 aa, Homo sapiens
  Table A; HLA-B*13:02; CTNNB1; D32N; 1
YLNSGIHSG

SEQ ID NO: 20584 - protein, 9 aa, Homo sapiens
  Table A; HLA-B*15:01; CTNNB1; D32N; 1
YLNSGIHSG

SEQ ID NO: 20585 - protein, 9 aa, Homo sapiens
  Table A; HLA-B*39:01; CTNNB1; D32N; 0
YLNSGIHSG

SEQ ID NO: 20586 - protein, 9 aa, Homo sapiens
  Table A; HLA-B*46:01; CTNNB1; D32N; 0
YLNSGIHSG

SEQ ID NO: 20587 - protein, 9 aa, Homo sapiens
  Table A; HLA-B*48:01; CTNNB1; D32N; 0
YLNSGIHSG

SEQ ID NO: 20588 - protein, 9 aa, Homo sapiens
  Table A; HLA-B*54:01; CTNNB1; D32N; 0
YLNSGIHSG

SEQ ID NO: 20589 - protein, 10 aa, Homo sapiens
  Table A; HLA-A*02:01; CTNNB1; D32N; 1
YLNSGIHSGA

SEQ ID NO: 20590 - protein, 10 aa, Homo sapiens
  Table A; HLA-A*02:03; CTNNB1; D32N; 0
YLNSGIHSGA

SEQ ID NO: 20591 - protein, 10 aa, Homo sapiens
  Table A; HLA-A*02:04; CTNNB1; D32N; 0
YLNSGIHSGA

SEQ ID NO: 20592 - protein, 10 aa, Homo sapiens
  Table A; HLA-A*02:05; CTNNB1; D32N; 0
YLNSGIHSGA

SEQ ID NO: 20593 - protein, 10 aa, Homo sapiens
  Table A; HLA-A*02:06; CTNNB1; D32N; 0
YLNSGIHSGA

SEQ ID NO: 20594 - protein, 10 aa, Homo sapiens
  Table A; HLA-A*02:07; CTNNB1; D32N; 0
YLNSGIHSGA

SEQ ID NO: 20595 - protein, 10 aa, Homo sapiens
  Table A; HLA-A*02:08; CTNNB1; D32N; 0
YLNSGIHSGA

SEQ ID NO: 20596 - protein, 10 aa, Homo sapiens
  Table A; HLA-A*03:01; CTNNB1; D32N; 1
YLNSGIHSGA

SEQ ID NO: 20597 - protein, 10 aa, Homo sapiens
  Table A; HLA-A*03:02; CTNNB1; D32N; 0
YLNSGIHSGA

SEQ ID NO: 20598 - protein, 10 aa, Homo sapiens
  Table A; HLA-A*26:03; CTNNB1; D32N; 0
YLNSGIHSGA

SEQ ID NO: 20599 - protein, 10 aa, Homo sapiens
  Table A; HLA-A*29:02; CTNNB1; D32N; 1
YLNSGIHSGA

SEQ ID NO: 20600 - protein, 10 aa, Homo sapiens
  Table A; HLA-A*30:01; CTNNB1; D32N; 0
YLNSGIHSGA

SEQ ID NO: 20601 - protein, 10 aa, Homo sapiens
  Table A; HLA-A*31:01; CTNNB1; D32N; 1
YLNSGIHSGA

SEQ ID NO: 20602 - protein, 10 aa, Homo sapiens
  Table A; HLA-A*33:03; CTNNB1; D32N; 0
YLNSGIHSGA

SEQ ID NO: 20603 - protein, 10 aa, Homo sapiens
  Table A; HLA-A*68:01; CTNNB1; D32N; 1
YLNSGIHSGA

SEQ ID NO: 20604 - protein, 10 aa, Homo sapiens
  Table A; HLA-A*68:02; CTNNB1; D32N; 0
YLNSGIHSGA

SEQ ID NO: 20605 - protein, 10 aa, Homo sapiens
  Table A; HLA-B*08:01; CTNNB1; D32N; 1
YLNSGIHSGA

SEQ ID NO: 20606 - protein, 10 aa, Homo sapiens
  Table A; HLA-B*13:02; CTNNB1; D32N; 1
YLNSGIHSGA

SEQ ID NO: 20607 - protein, 10 aa, Homo sapiens
  Table A; HLA-B*15:01; CTNNB1; D32N; 1
YLNSGIHSGA

SEQ ID NO: 20608 - protein, 10 aa, Homo sapiens
  Table A; HLA-B*39:06; CTNNB1; D32N; 0
YLNSGIHSGA

SEQ ID NO: 20609 - protein, 10 aa, Homo sapiens
  Table A; HLA-B*40:02; CTNNB1; D32N; 0
YLNSGIHSGA

SEQ ID NO: 20610 - protein, 10 aa, Homo sapiens
  Table A; HLA-B*48:01; CTNNB1; D32N; 0
YLNSGIHSGA

SEQ ID NO: 20611 - protein, 10 aa, Homo sapiens
  Table A; HLA-B*50:01; CTNNB1; D32N; 0
YLNSGIHSGA

SEQ ID NO: 20612 - protein, 10 aa, Homo sapiens
  Table A; HLA-B*54:01; CTNNB1; D32N; 0
YLNSGIHSGA

SEQ ID NO: 20613 - protein, 10 aa, Homo sapiens
  Table A; HLA-B*56:01; CTNNB1; D32N; 0
YLNSGIHSGA

SEQ ID NO: 20614 - protein, 10 aa, Homo sapiens
  Table A; HLA-C*08:03; CTNNB1; D32N; 0
YLNSGIHSGA

SEQ ID NO: 20615 - protein, 11 aa, Homo sapiens
  Table A; HLA-A*02:01; CTNNB1; D32N; 1
YLNSGIHSGAT

SEQ ID NO: 20616 - protein, 11 aa, Homo sapiens
  Table A; HLA-A*02:03; CTNNB1; D32N; 0
YLNSGIHSGAT

SEQ ID NO: 20617 - protein, 11 aa, Homo sapiens
  Table A; HLA-A*31:01; CTNNB1; D32N; 1
YLNSGIHSGAT

SEQ ID NO: 20618 - protein, 11 aa, Homo sapiens
  Table A; HLA-B*08:01; CTNNB1; D32N; 1
YLNSGIHSGAT

SEQ ID NO: 20619 - protein, 11 aa, Homo sapiens
  Table A; HLA-B*15:01; CTNNB1; D32N; 1
YLNSGIHSGAT

SEQ ID NO: 20620 - protein, 11 aa, Homo sapiens
  Table A; HLA-B*48:01; CTNNB1; D32N; 0
YLNSGIHSGAT

SEQ ID NO: 20621 - protein, 8 aa, Homo sapiens
  Table A; HLA-A*02:04; EP300; D1399N; 0
YLNSVHFF

SEQ ID NO: 20622 - protein, 8 aa, Homo sapiens
  Table A; HLA-A*23:01; EP300; D1399N; 0
YLNSVHFF

SEQ ID NO: 20623 - protein, 9 aa, Homo sapiens
  Table A; HLA-A*31:01; EP300; D1399N; 1
YLNSVHFFR

SEQ ID NO: 20624 - protein, 8 aa, Homo sapiens
  Table A; HLA-B*35:08; ERBB2; S310Y; 0
YLSTDVGY

SEQ ID NO: 20625 - protein, 8 aa, Homo sapiens
  Table A; HLA-B*39:01; ERBB2; S310Y; 0
YLSTDVGY

SEQ ID NO: 20626 - protein, 9 aa, Homo sapiens
  Table A; HLA-A*02:03; ERBB2; S310Y; 0
YLSTDVGYC

SEQ ID NO: 20627 - protein, 9 aa, Homo sapiens
  Table A; HLA-A*02:01; CTNNB1; D32V; 1
YLVSGIHSG

SEQ ID NO: 20628 - protein, 9 aa, Homo sapiens
  Table A; HLA-A*02:03; CTNNB1; D32V; 0
YLVSGIHSG

SEQ ID NO: 20629 - protein, 9 aa, Homo sapiens
  Table A; HLA-A*02:04; CTNNB1; D32V; 0
YLVSGIHSG

SEQ ID NO: 20630 - protein, 9 aa, Homo sapiens
  Table A; HLA-A*02:05; CTNNB1; D32V; 0
YLVSGIHSG

SEQ ID NO: 20631 - protein, 9 aa, Homo sapiens
  Table A; HLA-A*02:06; CTNNB1; D32V; 0
YLVSGIHSG

SEQ ID NO: 20632 - protein, 9 aa, Homo sapiens
  Table A; HLA-A*02:07; CTNNB1; D32V; 0
YLVSGIHSG

SEQ ID NO: 20633 - protein, 9 aa, Homo sapiens
  Table A; HLA-A*26:01; CTNNB1; D32V; 1
YLVSGIHSG

SEQ ID NO: 20634 - protein, 9 aa, Homo sapiens
  Table A; HLA-A*68:02; CTNNB1; D32V; 0
YLVSGIHSG

SEQ ID NO: 20635 - protein, 9 aa, Homo sapiens
  Table A; HLA-B*13:02; CTNNB1; D32V; 1
YLVSGIHSG

SEQ ID NO: 20636 - protein, 9 aa, Homo sapiens
  Table A; HLA-B*40:02; CTNNB1; D32V; 0
YLVSGIHSG

SEQ ID NO: 20637 - protein, 9 aa, Homo sapiens
  Table A; HLA-B*54:01; CTNNB1; D32V; 0
YLVSGIHSG

SEQ ID NO: 20638 - protein, 10 aa, Homo sapiens
  Table A; HLA-A*02:01; CTNNB1; D32V; 1
YLVSGIHSGA

SEQ ID NO: 20639 - protein, 10 aa, Homo sapiens
  Table A; HLA-A*02:03; CTNNB1; D32V; 0
YLVSGIHSGA

SEQ ID NO: 20640 - protein, 10 aa, Homo sapiens
  Table A; HLA-A*02:04; CTNNB1; D32V; 0
YLVSGIHSGA

SEQ ID NO: 20641 - protein, 10 aa, Homo sapiens
  Table A; HLA-A*02:05; CTNNB1; D32V; 0
YLVSGIHSGA

SEQ ID NO: 20642 - protein, 10 aa, Homo sapiens
  Table A; HLA-A*02:06; CTNNB1; D32V; 0
YLVSGIHSGA

SEQ ID NO: 20643 - protein, 10 aa, Homo sapiens
  Table A; HLA-A*02:07; CTNNB1; D32V; 0
YLVSGIHSGA

SEQ ID NO: 20644 - protein, 10 aa, Homo sapiens
  Table A; HLA-A*02:08; CTNNB1; D32V; 0
YLVSGIHSGA

SEQ ID NO: 20645 - protein, 10 aa, Homo sapiens
  Table A; HLA-A*03:01; CTNNB1; D32V; 1
YLVSGIHSGA

SEQ ID NO: 20646 - protein, 10 aa, Homo sapiens
  Table A; HLA-A*26:03; CTNNB1; D32V; 0
YLVSGIHSGA

SEQ ID NO: 20647 - protein, 10 aa, Homo sapiens
  Table A; HLA-A*29:02; CTNNB1; D32V; 1
YLVSGIHSGA

SEQ ID NO: 20648 - protein, 10 aa, Homo sapiens
  Table A; HLA-A*30:01; CTNNB1; D32V; 0
YLVSGIHSGA

SEQ ID NO: 20649 - protein, 10 aa, Homo sapiens
  Table A; HLA-A*31:01; CTNNB1; D32V; 1
YLVSGIHSGA

SEQ ID NO: 20650 - protein, 10 aa, Homo sapiens
  Table A; HLA-A*68:01; CTNNB1; D32V; 1
YLVSGIHSGA

SEQ ID NO: 20651 - protein, 10 aa, Homo sapiens
  Table A; HLA-A*68:02; CTNNB1; D32V; 0
YLVSGIHSGA

SEQ ID NO: 20652 - protein, 10 aa, Homo sapiens
  Table A; HLA-B*13:02; CTNNB1; D32V; 1
YLVSGIHSGA

SEQ ID NO: 20653 - protein, 10 aa, Homo sapiens
  Table A; HLA-B*15:01; CTNNB1; D32V; 1
YLVSGIHSGA

SEQ ID NO: 20654 - protein, 10 aa, Homo sapiens
  Table A; HLA-B*40:02; CTNNB1; D32V; 0
YLVSGIHSGA

SEQ ID NO: 20655 - protein, 10 aa, Homo sapiens
  Table A; HLA-B*48:01; CTNNB1; D32V; 0
YLVSGIHSGA

SEQ ID NO: 20656 - protein, 10 aa, Homo sapiens
  Table A; HLA-B*50:01; CTNNB1; D32V; 0
YLVSGIHSGA

SEQ ID NO: 20657 - protein, 10 aa, Homo sapiens
  Table A; HLA-B*54:01; CTNNB1; D32V; 0
YLVSGIHSGA

SEQ ID NO: 20658 - protein, 10 aa, Homo sapiens
  Table A; HLA-C*08:01; CTNNB1; D32V; 0
YLVSGIHSGA

SEQ ID NO: 20659 - protein, 11 aa, Homo sapiens
  Table A; HLA-A*02:01; CTNNB1; D32V; 1
YLVSGIHSGAT

SEQ ID NO: 20660 - protein, 11 aa, Homo sapiens
  Table A; HLA-A*02:03; CTNNB1; D32V; 0
YLVSGIHSGAT

SEQ ID NO: 20661 - protein, 11 aa, Homo sapiens
  Table A; HLA-A*68:02; CTNNB1; D32V; 0
YLVSGIHSGAT

SEQ ID NO: 20662 - protein, 11 aa, Homo sapiens
  Table A; HLA-B*48:01; CTNNB1; D32V; 0
YLVSGIHSGAT

SEQ ID NO: 20663 - protein, 9 aa, Homo sapiens
  Table A; HLA-A*02:01; CTNNB1; D32Y; 1
YLYSGIHSG

SEQ ID NO: 20664 - protein, 9 aa, Homo sapiens
  Table A; HLA-A*02:03; CTNNB1; D32Y; 0
YLYSGIHSG

SEQ ID NO: 20665 - protein, 9 aa, Homo sapiens
  Table A; HLA-A*02:04; CTNNB1; D32Y; 0
YLYSGIHSG

SEQ ID NO: 20666 - protein, 9 aa, Homo sapiens
  Table A; HLA-A*02:07; CTNNB1; D32Y; 0
YLYSGIHSG

SEQ ID NO: 20667 - protein, 9 aa, Homo sapiens
  Table A; HLA-A*03:01; CTNNB1; D32Y; 1
YLYSGIHSG

SEQ ID NO: 20668 - protein, 9 aa, Homo sapiens
  Table A; HLA-A*11:01; CTNNB1; D32Y; 1
YLYSGIHSG

SEQ ID NO: 20669 - protein, 9 aa, Homo sapiens
  Table A; HLA-A*26:01; CTNNB1; D32Y; 0
YLYSGIHSG

SEQ ID NO: 20670 - protein, 9 aa, Homo sapiens
  Table A; HLA-A*26:03; CTNNB1; D32Y; 0
YLYSGIHSG

SEQ ID NO: 20671 - protein, 9 aa, Homo sapiens
  Table A; HLA-A*29:02; CTNNB1; D32Y; 1
YLYSGIHSG

SEQ ID NO: 20672 - protein, 9 aa, Homo sapiens
  Table A; HLA-A*30:01; CTNNB1; D32Y; 0
YLYSGIHSG

SEQ ID NO: 20673 - protein, 9 aa, Homo sapiens
  Table A; HLA-A*31:01; CTNNB1; D32Y; 0
YLYSGIHSG

SEQ ID NO: 20674 - protein, 9 aa, Homo sapiens
  Table A; HLA-A*33:01; CTNNB1; D32Y; 0
YLYSGIHSG

SEQ ID NO: 20675 - protein, 9 aa, Homo sapiens
  Table A; HLA-A*33:03; CTNNB1; D32Y; 0
YLYSGIHSG

SEQ ID NO: 20676 - protein, 9 aa, Homo sapiens
  Table A; HLA-A*68:01; CTNNB1; D32Y; 0
YLYSGIHSG

SEQ ID NO: 20677 - protein, 9 aa, Homo sapiens
  Table A; HLA-A*68:02; CTNNB1; D32Y; 0
YLYSGIHSG

SEQ ID NO: 20678 - protein, 9 aa, Homo sapiens
  Table A; HLA-B*08:01; CTNNB1; D32Y; 1
YLYSGIHSG

SEQ ID NO: 20679 - protein, 9 aa, Homo sapiens
  Table A; HLA-B*13:02; CTNNB1; D32Y; 0
YLYSGIHSG

SEQ ID NO: 20680 - protein, 9 aa, Homo sapiens
  Table A; HLA-B*15:01; CTNNB1; D32Y; 1
YLYSGIHSG

SEQ ID NO: 20681 - protein, 9 aa, Homo sapiens
  Table A; HLA-B*15:02; CTNNB1; D32Y; 0
YLYSGIHSG

SEQ ID NO: 20682 - protein, 9 aa, Homo sapiens
  Table A; HLA-B*35:01; CTNNB1; D32Y; 1
YLYSGIHSG

SEQ ID NO: 20683 - protein, 9 aa, Homo sapiens
  Table A; HLA-B*39:06; CTNNB1; D32Y; 0
YLYSGIHSG

SEQ ID NO: 20684 - protein, 9 aa, Homo sapiens
  Table A; HLA-B*46:01; CTNNB1; D32Y; 0
YLYSGIHSG

SEQ ID NO: 20685 - protein, 9 aa, Homo sapiens
  Table A; HLA-B*50:01; CTNNB1; D32Y; 0
YLYSGIHSG

SEQ ID NO: 20686 - protein, 9 aa, Homo sapiens
  Table A; HLA-B*54:01; CTNNB1; D32Y; 0
YLYSGIHSG

SEQ ID NO: 20687 - protein, 9 aa, Homo sapiens
  Table A; HLA-C*08:01; CTNNB1; D32Y; 0
YLYSGIHSG

SEQ ID NO: 20688 - protein, 10 aa, Homo sapiens
  Table A; HLA-A*02:01; CTNNB1; D32Y; 1
YLYSGIHSGA

SEQ ID NO: 20689 - protein, 10 aa, Homo sapiens
  Table A; HLA-A*02:03; CTNNB1; D32Y; 0
YLYSGIHSGA

SEQ ID NO: 20690 - protein, 10 aa, Homo sapiens
  Table A; HLA-A*02:04; CTNNB1; D32Y; 0
YLYSGIHSGA

SEQ ID NO: 20691 - protein, 10 aa, Homo sapiens
  Table A; HLA-A*02:05; CTNNB1; D32Y; 0
YLYSGIHSGA

SEQ ID NO: 20692 - protein, 10 aa, Homo sapiens
  Table A; HLA-A*02:06; CTNNB1; D32Y; 0
YLYSGIHSGA

SEQ ID NO: 20693 - protein, 10 aa, Homo sapiens
  Table A; HLA-A*02:07; CTNNB1; D32Y; 0
YLYSGIHSGA

SEQ ID NO: 20694 - protein, 10 aa, Homo sapiens
  Table A; HLA-A*02:08; CTNNB1; D32Y; 0
YLYSGIHSGA

SEQ ID NO: 20695 - protein, 10 aa, Homo sapiens
  Table A; HLA-A*03:01; CTNNB1; D32Y; 1
YLYSGIHSGA

SEQ ID NO: 20696 - protein, 10 aa, Homo sapiens
  Table A; HLA-A*26:03; CTNNB1; D32Y; 0
YLYSGIHSGA

SEQ ID NO: 20697 - protein, 10 aa, Homo sapiens
  Table A; HLA-A*29:02; CTNNB1; D32Y; 1
YLYSGIHSGA

SEQ ID NO: 20698 - protein, 10 aa, Homo sapiens
  Table A; HLA-A*30:01; CTNNB1; D32Y; 0
YLYSGIHSGA

SEQ ID NO: 20699 - protein, 10 aa, Homo sapiens
  Table A; HLA-A*31:01; CTNNB1; D32Y; 0
YLYSGIHSGA

SEQ ID NO: 20700 - protein, 10 aa, Homo sapiens
  Table A; HLA-A*33:03; CTNNB1; D32Y; 0
YLYSGIHSGA

SEQ ID NO: 20701 - protein, 10 aa, Homo sapiens
  Table A; HLA-A*68:02; CTNNB1; D32Y; 0
YLYSGIHSGA

SEQ ID NO: 20702 - protein, 10 aa, Homo sapiens
  Table A; HLA-B*08:01; CTNNB1; D32Y; 1
YLYSGIHSGA

SEQ ID NO: 20703 - protein, 10 aa, Homo sapiens
  Table A; HLA-B*13:02; CTNNB1; D32Y; 0
YLYSGIHSGA

SEQ ID NO: 20704 - protein, 10 aa, Homo sapiens
  Table A; HLA-B*15:01; CTNNB1; D32Y; 1
YLYSGIHSGA

SEQ ID NO: 20705 - protein, 10 aa, Homo sapiens
  Table A; HLA-B*15:02; CTNNB1; D32Y; 0
YLYSGIHSGA

SEQ ID NO: 20706 - protein, 10 aa, Homo sapiens
  Table A; HLA-B*39:06; CTNNB1; D32Y; 0
YLYSGIHSGA

SEQ ID NO: 20707 - protein, 10 aa, Homo sapiens
  Table A; HLA-B*40:02; CTNNB1; D32Y; 0
YLYSGIHSGA

SEQ ID NO: 20708 - protein, 10 aa, Homo sapiens
  Table A; HLA-B*48:01; CTNNB1; D32Y; 0
YLYSGIHSGA

SEQ ID NO: 20709 - protein, 10 aa, Homo sapiens
  Table A; HLA-B*50:01; CTNNB1; D32Y; 0
YLYSGIHSGA

SEQ ID NO: 20710 - protein, 10 aa, Homo sapiens
  Table A; HLA-B*54:01; CTNNB1; D32Y; 0
YLYSGIHSGA

SEQ ID NO: 20711 - protein, 10 aa, Homo sapiens
  Table A; HLA-B*56:01; CTNNB1; D32Y; 0
YLYSGIHSGA

SEQ ID NO: 20712 - protein, 11 aa, Homo sapiens
  Table A; HLA-A*02:01; CTNNB1; D32Y; 1
YLYSGIHSGAT

SEQ ID NO: 20713 - protein, 11 aa, Homo sapiens
  Table A; HLA-A*02:03; CTNNB1; D32Y; 0
YLYSGIHSGAT

SEQ ID NO: 20714 - protein, 11 aa, Homo sapiens
  Table A; HLA-A*02:07; CTNNB1; D32Y; 0
YLYSGIHSGAT

SEQ ID NO: 20715 - protein, 11 aa, Homo sapiens
  Table A; HLA-A*03:01; CTNNB1; D32Y; 1
YLYSGIHSGAT

SEQ ID NO: 20716 - protein, 11 aa, Homo sapiens
  Table A; HLA-A*29:02; CTNNB1; D32Y; 1
YLYSGIHSGAT

SEQ ID NO: 20717 - protein, 11 aa, Homo sapiens
  Table A; HLA-A*31:01; CTNNB1; D32Y; 0
YLYSGIHSGAT

SEQ ID NO: 20718 - protein, 11 aa, Homo sapiens
  Table A; HLA-A*68:02; CTNNB1; D32Y; 0
YLYSGIHSGAT

SEQ ID NO: 20719 - protein, 11 aa, Homo sapiens
  Table A; HLA-B*08:01; CTNNB1; D32Y; 1
YLYSGIHSGAT

SEQ ID NO: 20720 - protein, 11 aa, Homo sapiens
  Table A; HLA-B*48:01; CTNNB1; D32Y; 0
YLYSGIHSGAT

SEQ ID NO: 20721 - protein, 11 aa, Homo sapiens
  Table A; HLA-C*07:04; CTNNB1; D32Y; 0
YLYSGIHSGAT

SEQ ID NO: 20722 - protein, 11 aa, Homo sapiens
  Table A; HLA-C*08:03; CTNNB1; D32Y; 0
YLYSGIHSGAT

SEQ ID NO: 20723 - protein, 8 aa, Homo sapiens
  Table A; HLA-B*15:01; TP53; C238F; 0
YMFNSSCM

SEQ ID NO: 20724 - protein, 8 aa, Homo sapiens
  Table A; HLA-B*15:02; TP53; C238F; 0
YMFNSSCM

SEQ ID NO: 20725 - protein, 8 aa, Homo sapiens
  Table A; HLA-B*15:03; TP53; C238F; 0
YMFNSSCM

SEQ ID NO: 20726 - protein, 8 aa, Homo sapiens
  Table A; HLA-C*08:01; TP53; C238F; 0
YMFNSSCM

SEQ ID NO: 20727 - protein, 8 aa, Homo sapiens
  Table A; HLA-C*14:02; TP53; C238F; 0
YMFNSSCM

SEQ ID NO: 20728 - protein, 8 aa, Homo sapiens
  Table A; HLA-A*03:01; CNBD1; L396P; 1
YMGKPKEK

SEQ ID NO: 20729 - protein, 8 aa, Homo sapiens
  Table A; HLA-A*03:02; CNBD1; L396P; 0
YMGKPKEK

SEQ ID NO: 20730 - protein, 8 aa, Homo sapiens
  Table A; HLA-A*11:01; CNBD1; L396P; 1
YMGKPKEK

SEQ ID NO: 20731 - protein, 9 aa, Homo sapiens
  Table A; HLA-A*02:03; PIK3CA; V344M; 0
YMNLNIRDI

SEQ ID NO: 20732 - protein, 9 aa, Homo sapiens
  Table A; HLA-A*02:07; CNTNAP2; T373M; 0
YMVPVFFNA

SEQ ID NO: 20733 - protein, 8 aa, Homo sapiens
  Table A; HLA-B*14:02; TP53; C238Y; 0
YMYNSSCM

SEQ ID NO: 20734 - protein, 8 aa, Homo sapiens
  Table A; HLA-B*15:01; TP53; C238Y; 0
YMYNSSCM

SEQ ID NO: 20735 - protein, 8 aa, Homo sapiens
  Table A; HLA-B*15:02; TP53; C238Y; 0
YMYNSSCM

SEQ ID NO: 20736 - protein, 8 aa, Homo sapiens
  Table A; HLA-B*15:03; TP53; C238Y; 0
YMYNSSCM

SEQ ID NO: 20737 - protein, 8 aa, Homo sapiens
  Table A; HLA-B*15:10; TP53; C238Y; 0
YMYNSSCM

SEQ ID NO: 20738 - protein, 8 aa, Homo sapiens
  Table A; HLA-C*08:01; TP53; C238Y; 0
YMYNSSCM

SEQ ID NO: 20739 - protein, 8 aa, Homo sapiens
  Table A; HLA-C*14:02; TP53; C238Y; 0
YMYNSSCM

SEQ ID NO: 20740 - protein, 10 aa, Homo sapiens
  Table A; HLA-A*26:03; GLI1; R637Q; 0
YNPNAGVTQR

SEQ ID NO: 20741 - protein, 10 aa, Homo sapiens
  Table A; HLA-A*33:03; GLI1; R637Q; 0
YNPNAGVTQR

SEQ ID NO: 20742 - protein, 10 aa, Homo sapiens
  Table A; HLA-A*68:01; GLI1; R637Q; 0
YNPNAGVTQR

SEQ ID NO: 20743 - protein, 10 aa, Homo sapiens
  Table A; HLA-B*27:02; ERBB2; S310Y; 0
YNYLSTDVGY

SEQ ID NO: 20744 - protein, 10 aa, Homo sapiens
  Table A; HLA-B*07:02; DICER1; S1344L; 1
YPDAHEGRLL

SEQ ID NO: 20745 - protein, 10 aa, Homo sapiens
  Table A; HLA-B*35:02; DICER1; S1344L; 0
YPDAHEGRLL

SEQ ID NO: 20746 - protein, 10 aa, Homo sapiens
  Table A; HLA-B*35:03; DICER1; S1344L; 0
YPDAHEGRLL

SEQ ID NO: 20747 - protein, 10 aa, Homo sapiens
  Table A; HLA-B*35:08; DICER1; S1344L; 0
YPDAHEGRLL

SEQ ID NO: 20748 - protein, 10 aa, Homo sapiens
  Table A; HLA-B*35:12; DICER1; S1344L; 0
YPDAHEGRLL

SEQ ID NO: 20749 - protein, 10 aa, Homo sapiens
  Table A; HLA-B*51:01; DICER1; S1344L; 1
YPDAHEGRLL

SEQ ID NO: 20750 - protein, 11 aa, Homo sapiens
  Table A; HLA-A*01:01; DICER1; S1344L; 1
YPDAHEGRLLY

SEQ ID NO: 20751 - protein, 11 aa, Homo sapiens
  Table A; HLA-B*35:01; DICER1; S1344L; 1
YPDAHEGRLLY

SEQ ID NO: 20752 - protein, 11 aa, Homo sapiens
  Table A; HLA-B*35:08; DICER1; S1344L; 0
YPDAHEGRLLY

SEQ ID NO: 20753 - protein, 8 aa, Homo sapiens
  Table A; HLA-B*54:01; PTEN; D92E; 0
YPFEEHNP

SEQ ID NO: 20754 - protein, 9 aa, Homo sapiens
  Table A; HLA-B*35:01; PTEN; D92E; 0
YPFEEHNPP

SEQ ID NO: 20755 - protein, 9 aa, Homo sapiens
  Table A; HLA-B*35:02; PTEN; D92E; 0
YPFEEHNPP

SEQ ID NO: 20756 - protein, 9 aa, Homo sapiens
  Table A; HLA-B*35:03; PTEN; D92E; 0
YPFEEHNPP

SEQ ID NO: 20757 - protein, 9 aa, Homo sapiens
  Table A; HLA-B*35:12; PTEN; D92E; 0
YPFEEHNPP

SEQ ID NO: 20758 - protein, 9 aa, Homo sapiens
  Table A; HLA-B*54:01; PTEN; D92E; 0
YPFEEHNPP

SEQ ID NO: 20759 - protein, 10 aa, Homo sapiens
  Table A; HLA-B*54:01; PTEN; D92E; 0
YPFEEHNPPQ

SEQ ID NO: 20760 - protein, 11 aa, Homo sapiens
  Table A; HLA-B*35:01; PTEN; D92E; 0
YPFEEHNPPQL

SEQ ID NO: 20761 - protein, 11 aa, Homo sapiens
  Table A; HLA-B*35:02; PTEN; D92E; 0
YPFEEHNPPQL

SEQ ID NO: 20762 - protein, 11 aa, Homo sapiens
  Table A; HLA-B*35:03; PTEN; D92E; 0
YPFEEHNPPQL

SEQ ID NO: 20763 - protein, 11 aa, Homo sapiens
  Table A; HLA-B*35:08; PTEN; D92E; 0
YPFEEHNPPQL

SEQ ID NO: 20764 - protein, 11 aa, Homo sapiens
  Table A; HLA-B*35:12; PTEN; D92E; 0
YPFEEHNPPQL

SEQ ID NO: 20765 - protein, 11 aa, Homo sapiens
  Table A; HLA-B*54:01; PTEN; D92E; 0
YPFEEHNPPQL

SEQ ID NO: 20766 - protein, 8 aa, Homo sapiens
  Table A; HLA-B*39:06; PREX2; H1404Y; 0
YPVLFAQA

SEQ ID NO: 20767 - protein, 8 aa, Homo sapiens
  Table A; HLA-B*54:01; PREX2; H1404Y; 0
YPVLFAQA

SEQ ID NO: 20768 - protein, 8 aa, Homo sapiens
  Table A; HLA-B*55:01; PREX2; H1404Y; 0
YPVLFAQA

SEQ ID NO: 20769 - protein, 8 aa, Homo sapiens
  Table A; HLA-B*55:02; PREX2; H1404Y; 0
YPVLFAQA

SEQ ID NO: 20770 - protein, 8 aa, Homo sapiens
  Table A; HLA-B*56:01; PREX2; H1404Y; 0
YPVLFAQA

SEQ ID NO: 20771 - protein, 9 aa, Homo sapiens
  Table A; HLA-B*07:02; PREX2; H1404Y; 1
YPVLFAQAL

SEQ ID NO: 20772 - protein, 9 aa, Homo sapiens
  Table A; HLA-B*14:02; PREX2; H1404Y; 0
YPVLFAQAL

SEQ ID NO: 20773 - protein, 9 aa, Homo sapiens
  Table A; HLA-B*15:02; PREX2; H1404Y; 0
YPVLFAQAL

SEQ ID NO: 20774 - protein, 9 aa, Homo sapiens
  Table A; HLA-B*35:01; PREX2; H1404Y; 1
YPVLFAQAL

SEQ ID NO: 20775 - protein, 9 aa, Homo sapiens
  Table A; HLA-B*35:03; PREX2; H1404Y; 0
YPVLFAQAL

SEQ ID NO: 20776 - protein, 9 aa, Homo sapiens
  Table A; HLA-B*35:12; PREX2; H1404Y; 0
YPVLFAQAL

SEQ ID NO: 20777 - protein, 9 aa, Homo sapiens
  Table A; HLA-B*51:01; PREX2; H1404Y; 1
YPVLFAQAL

SEQ ID NO: 20778 - protein, 9 aa, Homo sapiens
  Table A; HLA-B*54:01; PREX2; H1404Y; 0
YPVLFAQAL

SEQ ID NO: 20779 - protein, 9 aa, Homo sapiens
  Table A; HLA-B*55:02; PREX2; H1404Y; 0
YPVLFAQAL

SEQ ID NO: 20780 - protein, 9 aa, Homo sapiens
  Table A; HLA-C*08:01; PREX2; H1404Y; 0
YPVLFAQAL

SEQ ID NO: 20781 - protein, 9 aa, Homo sapiens
  Table A; HLA-B*54:01; TP53; C141Y; 0
YPVQLWVDS

SEQ ID NO: 20782 - protein, 9 aa, Homo sapiens
  Table A; HLA-A*02:04; TP53; R110L; 0
YQGSYGFLL

SEQ ID NO: 20783 - protein, 9 aa, Homo sapiens
  Table A; HLA-A*02:05; CDH1; D254Y; 0
YQNDNKPEF

SEQ ID NO: 20784 - protein, 9 aa, Homo sapiens
  Table A; HLA-A*02:06; CDH1; D254Y; 0
YQNDNKPEF

SEQ ID NO: 20785 - protein, 9 aa, Homo sapiens
  Table A; HLA-A*32:01; CDH1; D254Y; 0
YQNDNKPEF

SEQ ID NO: 20786 - protein, 9 aa, Homo sapiens
  Table A; HLA-B*13:01; CDH1; D254Y; 0
YQNDNKPEF

SEQ ID NO: 20787 - protein, 9 aa, Homo sapiens
  Table A; HLA-B*15:01; CDH1; D254Y; 1
YQNDNKPEF

SEQ ID NO: 20788 - protein, 9 aa, Homo sapiens
  Table A; HLA-B*15:02; CDH1; D254Y; 0
YQNDNKPEF

SEQ ID NO: 20789 - protein, 9 aa, Homo sapiens
  Table A; HLA-B*15:03; CDH1; D254Y; 0
YQNDNKPEF

SEQ ID NO: 20790 - protein, 9 aa, Homo sapiens
  Table A; HLA-B*15:10; CDH1; D254Y; 0
YQNDNKPEF

SEQ ID NO: 20791 - protein, 9 aa, Homo sapiens
  Table A; HLA-B*35:01; CDH1; D254Y; 1
YQNDNKPEF

SEQ ID NO: 20792 - protein, 9 aa, Homo sapiens
  Table A; HLA-B*38:01; CDH1; D254Y; 0
YQNDNKPEF

SEQ ID NO: 20793 - protein, 9 aa, Homo sapiens
  Table A; HLA-B*39:01; CDH1; D254Y; 0
YQNDNKPEF

SEQ ID NO: 20794 - protein, 9 aa, Homo sapiens
  Table A; HLA-B*46:01; CDH1; D254Y; 0
YQNDNKPEF

SEQ ID NO: 20795 - protein, 9 aa, Homo sapiens
  Table A; HLA-B*58:01; CDH1; D254Y; 0
YQNDNKPEF

SEQ ID NO: 20796 - protein, 9 aa, Homo sapiens
  Table A; HLA-C*02:02; CDH1; D254Y; 0
YQNDNKPEF

SEQ ID NO: 20797 - protein, 9 aa, Homo sapiens
  Table A; HLA-B*39:01; TP53; D281Y; 0
YRRTEEENL

SEQ ID NO: 20798 - protein, 9 aa, Homo sapiens
  Table A; HLA-C*06:02; TP53; D281Y; 0
YRRTEEENL

SEQ ID NO: 20799 - protein, 8 aa, Homo sapiens
  Table A; HLA-A*02:03; EGFR; A289T; 0
YSFGTTCV

SEQ ID NO: 20800 - protein, 8 aa, Homo sapiens
  Table A; HLA-B*13:02; EGFR; A289T; 0
YSFGTTCV

SEQ ID NO: 20801 - protein, 8 aa, Homo sapiens
  Table A; HLA-B*51:01; EGFR; A289T; 1
YSFGTTCV

SEQ ID NO: 20802 - protein, 8 aa, Homo sapiens
  Table A; HLA-B*54:01; EGFR; A289T; 0
YSFGTTCV

SEQ ID NO: 20803 - protein, 8 aa, Homo sapiens
  Table A; HLA-C*12:03; EGFR; A289T; 1
YSFGTTCV

SEQ ID NO: 20804 - protein, 9 aa, Homo sapiens
  Table A; HLA-A*03:01; EGFR; A289T; 1
YSFGTTCVK

SEQ ID NO: 20805 - protein, 9 aa, Homo sapiens
  Table A; HLA-A*03:02; EGFR; A289T; 0
YSFGTTCVK

SEQ ID NO: 20806 - protein, 9 aa, Homo sapiens
  Table A; HLA-A*11:01; EGFR; A289T; 1
YSFGTTCVK

SEQ ID NO: 20807 - protein, 9 aa, Homo sapiens
  Table A; HLA-A*68:01; EGFR; A289T; 0
YSFGTTCVK

SEQ ID NO: 20808 - protein, 10 aa, Homo sapiens
  Table A; HLA-A*03:01; EGFR; A289T; 1
YSFGTTCVKK

SEQ ID NO: 20809 - protein, 10 aa, Homo sapiens
  Table A; HLA-A*03:02; EGFR; A289T; 0
YSFGTTCVKK

SEQ ID NO: 20810 - protein, 10 aa, Homo sapiens
  Table A; HLA-A*11:01; EGFR; A289T; 1
YSFGTTCVKK

SEQ ID NO: 20811 - protein, 10 aa, Homo sapiens
  Table A; HLA-A*68:01; EGFR; A289T; 0
YSFGTTCVKK

SEQ ID NO: 20812 - protein, 8 aa, Homo sapiens
  Table A; HLA-A*02:03; EGFR; A289V; 0
YSFGVTCV

SEQ ID NO: 20813 - protein, 8 aa, Homo sapiens
  Table A; HLA-A*68:02; EGFR; A289V; 0
YSFGVTCV

SEQ ID NO: 20814 - protein, 8 aa, Homo sapiens
  Table A; HLA-B*13:02; EGFR; A289V; 1
YSFGVTCV

SEQ ID NO: 20815 - protein, 8 aa, Homo sapiens
  Table A; HLA-B*39:06; EGFR; A289V; 0
YSFGVTCV

SEQ ID NO: 20816 - protein, 8 aa, Homo sapiens
  Table A; HLA-B*40:02; EGFR; A289V; 0
YSFGVTCV

SEQ ID NO: 20817 - protein, 8 aa, Homo sapiens
  Table A; HLA-B*51:01; EGFR; A289V; 1
YSFGVTCV

SEQ ID NO: 20818 - protein, 8 aa, Homo sapiens
  Table A; HLA-B*54:01; EGFR; A289V; 0
YSFGVTCV

SEQ ID NO: 20819 - protein, 8 aa, Homo sapiens
  Table A; HLA-C*12:03; EGFR; A289V; 1
YSFGVTCV

SEQ ID NO: 20820 - protein, 9 aa, Homo sapiens
  Table A; HLA-A*03:01; EGFR; A289V; 1
YSFGVTCVK

SEQ ID NO: 20821 - protein, 9 aa, Homo sapiens
  Table A; HLA-A*11:01; EGFR; A289V; 1
YSFGVTCVK

SEQ ID NO: 20822 - protein, 9 aa, Homo sapiens
  Table A; HLA-A*68:01; EGFR; A289V; 1
YSFGVTCVK

SEQ ID NO: 20823 - protein, 10 aa, Homo sapiens
  Table A; HLA-A*11:01; EGFR; A289V; 1
YSFGVTCVKK

SEQ ID NO: 20824 - protein, 10 aa, Homo sapiens
  Table A; HLA-A*68:01; EGFR; A289V; 1
YSFGVTCVKK

SEQ ID NO: 20825 - protein, 8 aa, Homo sapiens
  Table A; HLA-A*02:03; CTNNB1; D32Y; 0
YSGIHSGA

SEQ ID NO: 20826 - protein, 8 aa, Homo sapiens
  Table A; HLA-A*02:05; CTNNB1; D32Y; 0
YSGIHSGA

SEQ ID NO: 20827 - protein, 8 aa, Homo sapiens
  Table A; HLA-A*02:08; CTNNB1; D32Y; 0
YSGIHSGA

SEQ ID NO: 20828 - protein, 8 aa, Homo sapiens
  Table A; HLA-B*08:01; CTNNB1; D32Y; 1
YSGIHSGA

SEQ ID NO: 20829 - protein, 8 aa, Homo sapiens
  Table A; HLA-B*39:01; CTNNB1; D32Y; 0
YSGIHSGA

SEQ ID NO: 20830 - protein, 8 aa, Homo sapiens
  Table A; HLA-B*39:06; CTNNB1; D32Y; 0
YSGIHSGA

SEQ ID NO: 20831 - protein, 8 aa, Homo sapiens
  Table A; HLA-B*48:01; CTNNB1; D32Y; 0
YSGIHSGA

SEQ ID NO: 20832 - protein, 8 aa, Homo sapiens
  Table A; HLA-B*54:01; CTNNB1; D32Y; 0
YSGIHSGA

SEQ ID NO: 20833 - protein, 8 aa, Homo sapiens
  Table A; HLA-C*08:01; CTNNB1; D32Y; 0
YSGIHSGA

SEQ ID NO: 20834 - protein, 8 aa, Homo sapiens
  Table A; HLA-C*08:03; CTNNB1; D32Y; 0
YSGIHSGA

SEQ ID NO: 20835 - protein, 8 aa, Homo sapiens
  Table A; HLA-C*12:03; CTNNB1; D32Y; 1
YSGIHSGA

SEQ ID NO: 20836 - protein, 9 aa, Homo sapiens
  Table A; HLA-A*02:03; CTNNB1; D32Y; 0
YSGIHSGAT

SEQ ID NO: 20837 - protein, 9 aa, Homo sapiens
  Table A; HLA-B*08:01; CTNNB1; D32Y; 1
YSGIHSGAT

SEQ ID NO: 20838 - protein, 9 aa, Homo sapiens
  Table A; HLA-B*27:05; CTNNB1; D32Y; 1
YSGIHSGAT

SEQ ID NO: 20839 - protein, 9 aa, Homo sapiens
  Table A; HLA-B*48:01; CTNNB1; D32Y; 0
YSGIHSGAT

SEQ ID NO: 20840 - protein, 9 aa, Homo sapiens
  Table A; HLA-C*07:04; CTNNB1; D32Y; 0
YSGIHSGAT

SEQ ID NO: 20841 - protein, 9 aa, Homo sapiens
  Table A; HLA-C*08:01; CTNNB1; D32Y; 0
YSGIHSGAT

SEQ ID NO: 20842 - protein, 9 aa, Homo sapiens
  Table A; HLA-C*08:03; CTNNB1; D32Y; 0
YSGIHSGAT

SEQ ID NO: 20843 - protein, 10 aa, Homo sapiens
  Table A; HLA-A*33:03; A1CF; E34K; 0
YSLVQKNGQR

SEQ ID NO: 20844 - protein, 8 aa, Homo sapiens
  Table A; HLA-A*02:07; TP53; L130F; 0
YSPAFNKM

SEQ ID NO: 20845 - protein, 8 aa, Homo sapiens
  Table A; HLA-C*01:02; TP53; L130F; 0
YSPAFNKM

SEQ ID NO: 20846 - protein, 9 aa, Homo sapiens
  Table A; HLA-B*57:01; TP53; L130F; 0
YSPAFNKMF

SEQ ID NO: 20847 - protein, 9 aa, Homo sapiens
  Table A; HLA-C*01:02; TP53; L130F; 0
YSPAFNKMF

SEQ ID NO: 20848 - protein, 9 aa, Homo sapiens
  Table A; HLA-C*02:02; TP53; L130F; 0
YSPAFNKMF

SEQ ID NO: 20849 - protein, 9 aa, Homo sapiens
  Table A; HLA-C*06:02; TP53; L130F; 0
YSPAFNKMF

SEQ ID NO: 20850 - protein, 9 aa, Homo sapiens
  Table A; HLA-C*12:03; TP53; L130F; 0
YSPAFNKMF

SEQ ID NO: 20851 - protein, 9 aa, Homo sapiens
  Table A; HLA-C*14:02; TP53; L130F; 0
YSPAFNKMF

SEQ ID NO: 20852 - protein, 9 aa, Homo sapiens
  Table A; HLA-C*16:01; TP53; L130F; 0
YSPAFNKMF

SEQ ID NO: 20853 - protein, 9 aa, Homo sapiens
  Table A; HLA-A*02:07; TP53; F134L; 0
YSPALNKML

SEQ ID NO: 20854 - protein, 9 aa, Homo sapiens
  Table A; HLA-C*01:02; TP53; F134L; 0
YSPALNKML

SEQ ID NO: 20855 - protein, 8 aa, Homo sapiens
  Table A; HLA-C*01:02; TP53; K132N; 0
YSPALNNM

SEQ ID NO: 20856 - protein, 9 aa, Homo sapiens
  Table A; HLA-A*02:07; TP53; K132N; 0
YSPALNNMF

SEQ ID NO: 20857 - protein, 9 aa, Homo sapiens
  Table A; HLA-A*23:01; TP53; K132N; 0
YSPALNNMF

SEQ ID NO: 20858 - protein, 9 aa, Homo sapiens
  Table A; HLA-A*24:02; TP53; K132N; 0
YSPALNNMF

SEQ ID NO: 20859 - protein, 9 aa, Homo sapiens
  Table A; HLA-B*58:01; TP53; K132N; 0
YSPALNNMF

SEQ ID NO: 20860 - protein, 9 aa, Homo sapiens
  Table A; HLA-C*01:02; TP53; K132N; 0
YSPALNNMF

SEQ ID NO: 20861 - protein, 9 aa, Homo sapiens
  Table A; HLA-B*57:01; TP53; K132R; 0
YSPALNRMF

SEQ ID NO: 20862 - protein, 9 aa, Homo sapiens
  Table A; HLA-C*01:02; TP53; K132R; 0
YSPALNRMF

SEQ ID NO: 20863 - protein, 9 aa, Homo sapiens
  Table A; HLA-C*16:01; TP53; K132R; 0
YSPALNRMF

SEQ ID NO: 20864 - protein, 9 aa, Homo sapiens
  Table A; HLA-B*50:01; ATM; R337C; 0
YSSGFCNIA

SEQ ID NO: 20865 - protein, 9 aa, Homo sapiens
  Table A; HLA-A*02:04; EZH2; M667T; 0
YTCSFLFNL

SEQ ID NO: 20866 - protein, 9 aa, Homo sapiens
  Table A; HLA-A*68:02; EZH2; M667T; 0
YTCSFLFNL

SEQ ID NO: 20867 - protein, 10 aa, Homo sapiens
  Table A; HLA-A*01:01; RAC1; P29L; 1
YTTNAFLGEY

SEQ ID NO: 20868 - protein, 10 aa, Homo sapiens
  Table A; HLA-A*25:01; RAC1; P29L; 0
YTTNAFLGEY

SEQ ID NO: 20869 - protein, 10 aa, Homo sapiens
  Table A; HLA-A*26:01; RAC1; P29L; 0
YTTNAFLGEY

SEQ ID NO: 20870 - protein, 10 aa, Homo sapiens
  Table A; HLA-A*26:02; RAC1; P29L; 0
YTTNAFLGEY

SEQ ID NO: 20871 - protein, 10 aa, Homo sapiens
  Table A; HLA-A*26:03; RAC1; P29L; 0
YTTNAFLGEY

SEQ ID NO: 20872 - protein, 10 aa, Homo sapiens
  Table A; HLA-A*29:01; RAC1; P29L; 0
YTTNAFLGEY

SEQ ID NO: 20873 - protein, 10 aa, Homo sapiens
  Table A; HLA-A*29:02; RAC1; P29L; 0
YTTNAFLGEY

SEQ ID NO: 20874 - protein, 10 aa, Homo sapiens
  Table A; HLA-A*30:02; RAC1; P29L; 0
YTTNAFLGEY

SEQ ID NO: 20875 - protein, 10 aa, Homo sapiens
  Table A; HLA-A*30:04; RAC1; P29L; 0
YTTNAFLGEY

SEQ ID NO: 20876 - protein, 10 aa, Homo sapiens
  Table A; HLA-A*68:02; RAC1; P29L; 0
YTTNAFLGEY

SEQ ID NO: 20877 - protein, 10 aa, Homo sapiens
  Table A; HLA-B*27:02; RAC1; P29L; 0
YTTNAFLGEY

SEQ ID NO: 20878 - protein, 10 aa, Homo sapiens
  Table A; HLA-C*03:02; RAC1; P29L; 0
YTTNAFLGEY

SEQ ID NO: 20879 - protein, 11 aa, Homo sapiens
  Table A; HLA-A*68:02; RAC1; P29L; 0
YTTNAFLGEYI

SEQ ID NO: 20880 - protein, 10 aa, Homo sapiens
  Table A; HLA-A*01:01; RAC1; P29S; 1
YTTNAFSGEY

SEQ ID NO: 20881 - protein, 10 aa, Homo sapiens
  Table A; HLA-A*25:01; RAC1; P29S; 1
YTTNAFSGEY

SEQ ID NO: 20882 - protein, 10 aa, Homo sapiens
  Table A; HLA-A*26:01; RAC1; P29S; 1
YTTNAFSGEY

SEQ ID NO: 20883 - protein, 10 aa, Homo sapiens
  Table A; HLA-A*26:03; RAC1; P29S; 0
YTTNAFSGEY

SEQ ID NO: 20884 - protein, 10 aa, Homo sapiens
  Table A; HLA-A*29:01; RAC1; P29S; 0
YTTNAFSGEY

SEQ ID NO: 20885 - protein, 10 aa, Homo sapiens
  Table A; HLA-A*29:02; RAC1; P29S; 1
YTTNAFSGEY

SEQ ID NO: 20886 - protein, 10 aa, Homo sapiens
  Table A; HLA-A*30:02; RAC1; P29S; 0
YTTNAFSGEY

SEQ ID NO: 20887 - protein, 10 aa, Homo sapiens
  Table A; HLA-A*30:04; RAC1; P29S; 0
YTTNAFSGEY

SEQ ID NO: 20888 - protein, 10 aa, Homo sapiens
  Table A; HLA-B*15:01; RAC1; P29S; 1
YTTNAFSGEY

SEQ ID NO: 20889 - protein, 10 aa, Homo sapiens
  Table A; HLA-B*27:02; RAC1; P29S; 0
YTTNAFSGEY

SEQ ID NO: 20890 - protein, 10 aa, Homo sapiens
  Table A; HLA-B*39:01; RAC1; P29S; 0
YTTNAFSGEY

SEQ ID NO: 20891 - protein, 10 aa, Homo sapiens
  Table A; HLA-C*03:02; RAC1; P29S; 0
YTTNAFSGEY

SEQ ID NO: 20892 - protein, 11 aa, Homo sapiens
  Table A; HLA-A*68:02; RAC1; P29S; 0
YTTNAFSGEYI

SEQ ID NO: 20893 - protein, 8 aa, Homo sapiens
  Table A; HLA-A*68:02; CTNNB1; K335I; 0
YTYEILLW

SEQ ID NO: 20894 - protein, 8 aa, Homo sapiens
  Table A; HLA-B*57:01; CTNNB1; K335I; 1
YTYEILLW

SEQ ID NO: 20895 - protein, 9 aa, Homo sapiens
  Table A; HLA-A*68:02; CTNNB1; K335I; 0
YTYEILLWT

SEQ ID NO: 20896 - protein, 10 aa, Homo sapiens
  Table A; HLA-A*68:02; CTNNB1; K335I; 0
YTYEILLWTT

SEQ ID NO: 20897 - protein, 8 aa, Homo sapiens
  Table A; HLA-A*33:03; SF3B1; R625C; 0
YVCNTTAR

SEQ ID NO: 20898 - protein, 8 aa, Homo sapiens
  Table A; HLA-A*68:01; SF3B1; R625C; 0
YVCNTTAR

SEQ ID NO: 20899 - protein, 9 aa, Homo sapiens
  Table A; HLA-A*68:02; SF3B1; R625C; 0
YVCNTTARA

SEQ ID NO: 20900 - protein, 9 aa, Homo sapiens
  Table A; HLA-B*54:01; SF3B1; R625C; 0
YVCNTTARA

SEQ ID NO: 20901 - protein, 10 aa, Homo sapiens
  Table A; HLA-A*25:01; SF3B1; R625C; 0
YVCNTTARAF

SEQ ID NO: 20902 - protein, 9 aa, Homo sapiens
  Table A; HLA-C*08:01; SMAD4; R361C; 0
YVDPSGGDC

SEQ ID NO: 20903 - protein, 9 aa, Homo sapiens
  Table A; HLA-C*08:02; SMAD4; R361C; 0
YVDPSGGDC

SEQ ID NO: 20904 - protein, 10 aa, Homo sapiens
  Table A; HLA-A*01:01; SMAD4; R361C; 1
YVDPSGGDCF

SEQ ID NO: 20905 - protein, 10 aa, Homo sapiens
  Table A; HLA-A*02:05; SMAD4; R361C; 0
YVDPSGGDCF

SEQ ID NO: 20906 - protein, 10 aa, Homo sapiens
  Table A; HLA-A*02:06; SMAD4; R361C; 0
YVDPSGGDCF

SEQ ID NO: 20907 - protein, 10 aa, Homo sapiens
  Table A; HLA-A*02:07; SMAD4; R361C; 0
YVDPSGGDCF

SEQ ID NO: 20908 - protein, 10 aa, Homo sapiens
  Table A; HLA-A*02:08; SMAD4; R361C; 0
YVDPSGGDCF

SEQ ID NO: 20909 - protein, 10 aa, Homo sapiens
  Table A; HLA-A*26:01; SMAD4; R361C; 0
YVDPSGGDCF

SEQ ID NO: 20910 - protein, 10 aa, Homo sapiens
  Table A; HLA-A*26:02; SMAD4; R361C; 0
YVDPSGGDCF

SEQ ID NO: 20911 - protein, 10 aa, Homo sapiens
  Table A; HLA-B*13:01; SMAD4; R361C; 0
YVDPSGGDCF

SEQ ID NO: 20912 - protein, 10 aa, Homo sapiens
  Table A; HLA-B*15:01; SMAD4; R361C; 1
YVDPSGGDCF

SEQ ID NO: 20913 - protein, 10 aa, Homo sapiens
  Table A; HLA-B*15:02; SMAD4; R361C; 0
YVDPSGGDCF

SEQ ID NO: 20914 - protein, 10 aa, Homo sapiens
  Table A; HLA-B*15:13; SMAD4; R361C; 0
YVDPSGGDCF

SEQ ID NO: 20915 - protein, 10 aa, Homo sapiens
  Table A; HLA-B*35:01; SMAD4; R361C; 1
YVDPSGGDCF

SEQ ID NO: 20916 - protein, 10 aa, Homo sapiens
  Table A; HLA-B*35:02; SMAD4; R361C; 0
YVDPSGGDCF

SEQ ID NO: 20917 - protein, 10 aa, Homo sapiens
  Table A; HLA-B*35:03; SMAD4; R361C; 0
YVDPSGGDCF

SEQ ID NO: 20918 - protein, 10 aa, Homo sapiens
  Table A; HLA-B*35:08; SMAD4; R361C; 0
YVDPSGGDCF

SEQ ID NO: 20919 - protein, 10 aa, Homo sapiens
  Table A; HLA-B*35:12; SMAD4; R361C; 0
YVDPSGGDCF

SEQ ID NO: 20920 - protein, 10 aa, Homo sapiens
  Table A; HLA-B*38:01; SMAD4; R361C; 0
YVDPSGGDCF

SEQ ID NO: 20921 - protein, 10 aa, Homo sapiens
  Table A; HLA-B*39:01; SMAD4; R361C; 0
YVDPSGGDCF

SEQ ID NO: 20922 - protein, 10 aa, Homo sapiens
  Table A; HLA-B*48:01; SMAD4; R361C; 0
YVDPSGGDCF

SEQ ID NO: 20923 - protein, 10 aa, Homo sapiens
  Table A; HLA-B*50:01; SMAD4; R361C; 0
YVDPSGGDCF

SEQ ID NO: 20924 - protein, 10 aa, Homo sapiens
  Table A; HLA-B*58:01; SMAD4; R361C; 0
YVDPSGGDCF

SEQ ID NO: 20925 - protein, 10 aa, Homo sapiens
  Table A; HLA-C*02:02; SMAD4; R361C; 0
YVDPSGGDCF

SEQ ID NO: 20926 - protein, 10 aa, Homo sapiens
  Table A; HLA-C*03:02; SMAD4; R361C; 0
YVDPSGGDCF

SEQ ID NO: 20927 - protein, 10 aa, Homo sapiens
  Table A; HLA-C*03:03; SMAD4; R361C; 1
YVDPSGGDCF

SEQ ID NO: 20928 - protein, 10 aa, Homo sapiens
  Table A; HLA-C*03:04; SMAD4; R361C; 1
YVDPSGGDCF

SEQ ID NO: 20929 - protein, 10 aa, Homo sapiens
  Table A; HLA-C*05:01; SMAD4; R361C; 1
YVDPSGGDCF

SEQ ID NO: 20930 - protein, 10 aa, Homo sapiens
  Table A; HLA-C*08:01; SMAD4; R361C; 0
YVDPSGGDCF

SEQ ID NO: 20931 - protein, 10 aa, Homo sapiens
  Table A; HLA-C*08:02; SMAD4; R361C; 0
YVDPSGGDCF

SEQ ID NO: 20932 - protein, 10 aa, Homo sapiens
  Table A; HLA-C*17:01; SMAD4; R361C; 0
YVDPSGGDCF

SEQ ID NO: 20933 - protein, 9 aa, Homo sapiens
  Table A; HLA-B*39:01; SMAD4; R361H; 0
YVDPSGGDH

SEQ ID NO: 20934 - protein, 10 aa, Homo sapiens
  Table A; HLA-A*01:01; SMAD4; R361H; 1
YVDPSGGDHF

SEQ ID NO: 20935 - protein, 10 aa, Homo sapiens
  Table A; HLA-A*02:05; SMAD4; R361H; 0
YVDPSGGDHF

SEQ ID NO: 20936 - protein, 10 aa, Homo sapiens
  Table A; HLA-A*02:06; SMAD4; R361H; 0
YVDPSGGDHF

SEQ ID NO: 20937 - protein, 10 aa, Homo sapiens
  Table A; HLA-A*02:07; SMAD4; R361H; 0
YVDPSGGDHF

SEQ ID NO: 20938 - protein, 10 aa, Homo sapiens
  Table A; HLA-A*26:02; SMAD4; R361H; 0
YVDPSGGDHF

SEQ ID NO: 20939 - protein, 10 aa, Homo sapiens
  Table A; HLA-B*13:01; SMAD4; R361H; 0
YVDPSGGDHF

SEQ ID NO: 20940 - protein, 10 aa, Homo sapiens
  Table A; HLA-B*15:01; SMAD4; R361H; 1
YVDPSGGDHF

SEQ ID NO: 20941 - protein, 10 aa, Homo sapiens
  Table A; HLA-B*15:02; SMAD4; R361H; 0
YVDPSGGDHF

SEQ ID NO: 20942 - protein, 10 aa, Homo sapiens
  Table A; HLA-B*15:13; SMAD4; R361H; 0
YVDPSGGDHF

SEQ ID NO: 20943 - protein, 10 aa, Homo sapiens
  Table A; HLA-B*35:01; SMAD4; R361H; 1
YVDPSGGDHF

SEQ ID NO: 20944 - protein, 10 aa, Homo sapiens
  Table A; HLA-B*35:02; SMAD4; R361H; 0
YVDPSGGDHF

SEQ ID NO: 20945 - protein, 10 aa, Homo sapiens
  Table A; HLA-B*35:03; SMAD4; R361H; 0
YVDPSGGDHF

SEQ ID NO: 20946 - protein, 10 aa, Homo sapiens
  Table A; HLA-B*35:08; SMAD4; R361H; 0
YVDPSGGDHF

SEQ ID NO: 20947 - protein, 10 aa, Homo sapiens
  Table A; HLA-B*35:12; SMAD4; R361H; 0
YVDPSGGDHF

SEQ ID NO: 20948 - protein, 10 aa, Homo sapiens
  Table A; HLA-B*38:01; SMAD4; R361H; 0
YVDPSGGDHF

SEQ ID NO: 20949 - protein, 10 aa, Homo sapiens
  Table A; HLA-B*39:01; SMAD4; R361H; 0
YVDPSGGDHF

SEQ ID NO: 20950 - protein, 10 aa, Homo sapiens
  Table A; HLA-B*48:01; SMAD4; R361H; 0
YVDPSGGDHF

SEQ ID NO: 20951 - protein, 10 aa, Homo sapiens
  Table A; HLA-B*58:01; SMAD4; R361H; 0
YVDPSGGDHF

SEQ ID NO: 20952 - protein, 10 aa, Homo sapiens
  Table A; HLA-C*02:02; SMAD4; R361H; 1
YVDPSGGDHF

SEQ ID NO: 20953 - protein, 10 aa, Homo sapiens
  Table A; HLA-C*03:02; SMAD4; R361H; 0
YVDPSGGDHF

SEQ ID NO: 20954 - protein, 10 aa, Homo sapiens
  Table A; HLA-C*03:04; SMAD4; R361H; 1
YVDPSGGDHF

SEQ ID NO: 20955 - protein, 10 aa, Homo sapiens
  Table A; HLA-C*04:01; SMAD4; R361H; 1
YVDPSGGDHF

SEQ ID NO: 20956 - protein, 10 aa, Homo sapiens
  Table A; HLA-C*05:01; SMAD4; R361H; 1
YVDPSGGDHF

SEQ ID NO: 20957 - protein, 10 aa, Homo sapiens
  Table A; HLA-C*08:01; SMAD4; R361H; 0
YVDPSGGDHF

SEQ ID NO: 20958 - protein, 10 aa, Homo sapiens
  Table A; HLA-C*08:02; SMAD4; R361H; 1
YVDPSGGDHF

SEQ ID NO: 20959 - protein, 10 aa, Homo sapiens
  Table A; HLA-C*17:01; SMAD4; R361H; 0
YVDPSGGDHF

SEQ ID NO: 20960 - protein, 11 aa, Homo sapiens
  Table A; HLA-A*02:01; SMAD4; R361H; 1
YVDPSGGDHFC

SEQ ID NO: 20961 - protein, 11 aa, Homo sapiens
  Table A; HLA-A*02:06; SMAD4; R361H; 0
YVDPSGGDHFC

SEQ ID NO: 20962 - protein, 8 aa, Homo sapiens
  Table A; HLA-B*08:01; EZH2; E745K; 1
YVGIKREM

SEQ ID NO: 20963 - protein, 8 aa, Homo sapiens
  Table A; HLA-A*03:01; SF3B1; R625H; 1
YVHNTTAR

SEQ ID NO: 20964 - protein, 8 aa, Homo sapiens
  Table A; HLA-A*26:01; SF3B1; R625H; 0
YVHNTTAR

SEQ ID NO: 20965 - protein, 8 aa, Homo sapiens
  Table A; HLA-A*26:03; SF3B1; R625H; 0
YVHNTTAR

SEQ ID NO: 20966 - protein, 8 aa, Homo sapiens
  Table A; HLA-A*31:01; SF3B1; R625H; 0
YVHNTTAR

SEQ ID NO: 20967 - protein, 8 aa, Homo sapiens
  Table A; HLA-A*33:01; SF3B1; R625H; 0
YVHNTTAR

SEQ ID NO: 20968 - protein, 8 aa, Homo sapiens
  Table A; HLA-A*33:03; SF3B1; R625H; 0
YVHNTTAR

SEQ ID NO: 20969 - protein, 8 aa, Homo sapiens
  Table A; HLA-A*68:01; SF3B1; R625H; 0
YVHNTTAR

SEQ ID NO: 20970 - protein, 8 aa, Homo sapiens
  Table A; HLA-A*68:02; SF3B1; R625H; 0
YVHNTTAR

SEQ ID NO: 20971 - protein, 8 aa, Homo sapiens
  Table A; HLA-B*08:01; SF3B1; R625H; 1
YVHNTTAR

SEQ ID NO: 20972 - protein, 8 aa, Homo sapiens
  Table A; HLA-B*27:05; SF3B1; R625H; 0
YVHNTTAR

SEQ ID NO: 20973 - protein, 8 aa, Homo sapiens
  Table A; HLA-B*46:01; SF3B1; R625H; 0
YVHNTTAR

SEQ ID NO: 20974 - protein, 8 aa, Homo sapiens
  Table A; HLA-B*48:01; SF3B1; R625H; 0
YVHNTTAR

SEQ ID NO: 20975 - protein, 8 aa, Homo sapiens
  Table A; HLA-B*54:01; SF3B1; R625H; 0
YVHNTTAR

SEQ ID NO: 20976 - protein, 9 aa, Homo sapiens
  Table A; HLA-A*02:03; SF3B1; R625H; 0
YVHNTTARA

SEQ ID NO: 20977 - protein, 9 aa, Homo sapiens
  Table A; HLA-A*02:05; SF3B1; R625H; 0
YVHNTTARA

SEQ ID NO: 20978 - protein, 9 aa, Homo sapiens
  Table A; HLA-A*02:08; SF3B1; R625H; 0
YVHNTTARA

SEQ ID NO: 20979 - protein, 9 aa, Homo sapiens
  Table A; HLA-A*26:03; SF3B1; R625H; 0
YVHNTTARA

SEQ ID NO: 20980 - protein, 9 aa, Homo sapiens
  Table A; HLA-A*68:02; SF3B1; R625H; 0
YVHNTTARA

SEQ ID NO: 20981 - protein, 9 aa, Homo sapiens
  Table A; HLA-B*50:01; SF3B1; R625H; 0
YVHNTTARA

SEQ ID NO: 20982 - protein, 9 aa, Homo sapiens
  Table A; HLA-B*54:01; SF3B1; R625H; 0
YVHNTTARA

SEQ ID NO: 20983 - protein, 10 aa, Homo sapiens
  Table A; HLA-A*25:01; SF3B1; R625H; 0
YVHNTTARAF

SEQ ID NO: 20984 - protein, 10 aa, Homo sapiens
  Table A; HLA-A*26:01; SF3B1; R625H; 0
YVHNTTARAF

SEQ ID NO: 20985 - protein, 10 aa, Homo sapiens
  Table A; HLA-A*26:03; SF3B1; R625H; 0
YVHNTTARAF

SEQ ID NO: 20986 - protein, 10 aa, Homo sapiens
  Table A; HLA-A*68:01; SF3B1; R625H; 0
YVHNTTARAF

SEQ ID NO: 20987 - protein, 10 aa, Homo sapiens
  Table A; HLA-A*68:02; SF3B1; R625H; 0
YVHNTTARAF

SEQ ID NO: 20988 - protein, 10 aa, Homo sapiens
  Table A; HLA-B*07:02; SF3B1; R625H; 1
YVHNTTARAF

SEQ ID NO: 20989 - protein, 10 aa, Homo sapiens
  Table A; HLA-B*08:01; SF3B1; R625H; 1
YVHNTTARAF

SEQ ID NO: 20990 - protein, 10 aa, Homo sapiens
  Table A; HLA-B*15:01; SF3B1; R625H; 1
YVHNTTARAF

SEQ ID NO: 20991 - protein, 10 aa, Homo sapiens
  Table A; HLA-B*15:02; SF3B1; R625H; 0
YVHNTTARAF

SEQ ID NO: 20992 - protein, 10 aa, Homo sapiens
  Table A; HLA-B*46:01; SF3B1; R625H; 0
YVHNTTARAF

SEQ ID NO: 20993 - protein, 10 aa, Homo sapiens
  Table A; HLA-B*57:01; SF3B1; R625H; 0
YVHNTTARAF

SEQ ID NO: 20994 - protein, 10 aa, Homo sapiens
  Table A; HLA-C*01:02; SF3B1; R625H; 0
YVHNTTARAF

SEQ ID NO: 20995 - protein, 10 aa, Homo sapiens
  Table A; HLA-C*02:02; SF3B1; R625H; 0
YVHNTTARAF

SEQ ID NO: 20996 - protein, 10 aa, Homo sapiens
  Table A; HLA-C*03:04; SF3B1; R625H; 1
YVHNTTARAF

SEQ ID NO: 20997 - protein, 10 aa, Homo sapiens
  Table A; HLA-C*08:01; SF3B1; R625H; 0
YVHNTTARAF

SEQ ID NO: 20998 - protein, 11 aa, Homo sapiens
  Table A; HLA-A*68:02; SF3B1; R625H; 0
YVHNTTARAFA

SEQ ID NO: 20999 - protein, 9 aa, Homo sapiens
  Table A; HLA-A*02:03; PIK3CA; N345K; 0
YVKLNIRDI

SEQ ID NO: 21000 - protein, 9 aa, Homo sapiens
  Table A; HLA-A*02:01; RHOA; Y42C; 1
YVPTVFENC

SEQ ID NO: 21001 - protein, 9 aa, Homo sapiens
  Table A; HLA-A*02:05; RHOA; Y42C; 0
YVPTVFENC

SEQ ID NO: 21002 - protein, 9 aa, Homo sapiens
  Table A; HLA-A*02:06; RHOA; Y42C; 0
YVPTVFENC

SEQ ID NO: 21003 - protein, 9 aa, Homo sapiens
  Table A; HLA-A*02:07; RHOA; Y42C; 0
YVPTVFENC

SEQ ID NO: 21004 - protein, 9 aa, Homo sapiens
  Table A; HLA-A*02:08; RHOA; Y42C; 0
YVPTVFENC

SEQ ID NO: 21005 - protein, 9 aa, Homo sapiens
  Table A; HLA-A*68:02; RHOA; Y42C; 0
YVPTVFENC

SEQ ID NO: 21006 - protein, 10 aa, Homo sapiens
  Table A; HLA-A*02:05; RHOA; Y42C; 0
YVPTVFENCV

SEQ ID NO: 21007 - protein, 10 aa, Homo sapiens
  Table A; HLA-A*68:02; RHOA; Y42C; 0
YVPTVFENCV

SEQ ID NO: 21008 - protein, 9 aa, Homo sapiens
  Table A; HLA-A*33:03; MAPK1; E322K; 0
YYDPSDKPI

SEQ ID NO: 21009 - protein, 9 aa, Homo sapiens
  Table A; HLA-B*35:02; MAPK1; E322K; 0
YYDPSDKPI

SEQ ID NO: 21010 - protein, 9 aa, Homo sapiens
  Table A; HLA-B*35:03; MAPK1; E322K; 1
YYDPSDKPI

SEQ ID NO: 21011 - protein, 9 aa, Homo sapiens
  Table A; HLA-B*38:01; MAPK1; E322K; 1
YYDPSDKPI

SEQ ID NO: 21012 - protein, 9 aa, Homo sapiens
  Table A; HLA-B*48:01; MAPK1; E322K; 0
YYDPSDKPI

SEQ ID NO: 21013 - protein, 9 aa, Homo sapiens
  Table A; HLA-C*04:01; MAPK1; E322K; 1
YYDPSDKPI

SEQ ID NO: 21014 - protein, 9 aa, Homo sapiens
  Table A; HLA-C*07:02; MAPK1; E322K; 1
YYDPSDKPI

SEQ ID NO: 21015 - protein, 9 aa, Homo sapiens
  Table A; HLA-C*08:02; MAPK1; E322K; 1
YYDPSDKPI

SEQ ID NO: 21016 - protein, 9 aa, Homo sapiens
  AACR GENIE Results; ACVR1_p.S290L; A2902
HYHEMGLLY

SEQ ID NO: 21017 - protein, 9 aa, Homo sapiens
  AACR GENIE Results; ACVR1_p.S290L; B1801
HEMGLLYDY

SEQ ID NO: 21018 - protein, 11 aa, Homo sapiens
  AACR GENIE Results; ACVR1_p.S290L; A0201
LLYDYLQLTTL

SEQ ID NO: 21019 - protein, 10 aa, Homo sapiens
  AACR GENIE Results; AKT2_p.D416N; A0301
SINWQNVVQK

SEQ ID NO: 21020 - protein, 10 aa, Homo sapiens
  AACR GENIE Results; AKT2_p.D416N; A1101
SINWQNVVQK

SEQ ID NO: 21021 - protein, 11 aa, Homo sapiens
  AACR GENIE Results; AKT2_p.D416N; A6801
LSINWQNVVQK

SEQ ID NO: 21022 - protein, 11 aa, Homo sapiens
  AACR GENIE Results; AKT2_p.D416N; A1101
LSINWQNVVQK

SEQ ID NO: 21023 - protein, 9 aa, Homo sapiens
  AACR GENIE Results; AKT2_p.D416N; A1101
INWQNVVQK

SEQ ID NO: 21024 - protein, 9 aa, Homo sapiens
  AACR GENIE Results; AKT3_p.R249S; A0101
FSEDRTSFY

SEQ ID NO: 21025 - protein, 10 aa, Homo sapiens
  AACR GENIE Results; AKT3_p.R249S; B1501
RVFSEDRTSF

SEQ ID NO: 21026 - protein, 10 aa, Homo sapiens
  AACR GENIE Results; AKT3_p.R249S; B5701
RVFSEDRTSF

SEQ ID NO: 21027 - protein, 10 aa, Homo sapiens
  AACR GENIE Results; AKT3_p.R249S; A3201
RVFSEDRTSF

SEQ ID NO: 21028 - protein, 9 aa, Homo sapiens
  AACR GENIE Results; AKT3_p.R249S; A2402
VFSEDRTSF

SEQ ID NO: 21029 - protein, 9 aa, Homo sapiens
  AACR GENIE Results; AKT3_p.R249S; A2301
VFSEDRTSF

SEQ ID NO: 21030 - protein, 10 aa, Homo sapiens
  AACR GENIE Results; AKT3_p.R249S; A2902
VFSEDRTSFY

SEQ ID NO: 21031 - protein, 9 aa, Homo sapiens
  AACR GENIE Results; AKT3_p.R249S; B1501
VFSEDRTSF

SEQ ID NO: 21032 - protein, 11 aa, Homo sapiens
  AACR GENIE Results; AKT3_p.R249S; A0301
RVFSEDRTSFY

SEQ ID NO: 21033 - protein, 8 aa, Homo sapiens
  AACR GENIE Results; AKT3_p.R249S; B1801
SEDRTSFY

SEQ ID NO: 21034 - protein, 9 aa, Homo sapiens
  AACR GENIE Results; AKT3_p.R249S; C1601
FSEDRTSFY

SEQ ID NO: 21035 - protein, 11 aa, Homo sapiens
  AACR GENIE Results; AKT3_p.R249S; A6801
TSFYGAEIVSA

SEQ ID NO: 21036 - protein, 9 aa, Homo sapiens
  AACR GENIE Results; AKT3_p.R249S; C1601
VFSEDRTSF

SEQ ID NO: 21037 - protein, 8 aa, Homo sapiens
  AACR GENIE Results; AKT3_p.R249S; C1601
FSEDRTSF

SEQ ID NO: 21038 - protein, 9 aa, Homo sapiens
  AACR GENIE Results; AKT3_p.R249S; C0202
FSEDRTSFY

SEQ ID NO: 21039 - protein, 9 aa, Homo sapiens
  AACR GENIE Results; ALK_p.A1280V; B2705
ARDIYRVSY

SEQ ID NO: 21040 - protein, 9 aa, Homo sapiens
  AACR GENIE Results; ALK_p.A1280V; A0201
GMARDIYRV

SEQ ID NO: 21041 - protein, 8 aa, Homo sapiens
  AACR GENIE Results; ALK_p.C154F; B1801
EEAILEGF

SEQ ID NO: 21042 - protein, 9 aa, Homo sapiens
  AACR GENIE Results; ALK_p.C154F; B4001
GEEAILEGF

SEQ ID NO: 21043 - protein, 9 aa, Homo sapiens
  AACR GENIE Results; ALK_p.C154F; C0304
FVGPPGEAA

SEQ ID NO: 21044 - protein, 9 aa, Homo sapiens
  AACR GENIE Results; ALK_p.C154F; A0201
FVGPPGEAA

SEQ ID NO: 21045 - protein, 9 aa, Homo sapiens
  AACR GENIE Results; ALK_p.G843R; C1601
AARGGGRAY

SEQ ID NO: 21046 - protein, 9 aa, Homo sapiens
  AACR GENIE Results; ALK_p.G843R; B1501
AARGGGRAY

SEQ ID NO: 21047 - protein, 11 aa, Homo sapiens
  AACR GENIE Results; ALK_p.P1398L; A2601
DVINTALLIEY

SEQ ID NO: 21048 - protein, 9 aa, Homo sapiens
  AACR GENIE Results; ALK_p.P1398L; A0201
LLIEYGPLV

SEQ ID NO: 21049 - protein, 8 aa, Homo sapiens
  AACR GENIE Results; ALK_p.R1181C; B1302
HQNIVCCI

SEQ ID NO: 21050 - protein, 9 aa, Homo sapiens
  AACR GENIE Results; ALK_p.R1181C; B3801
NHQNIVCCI

SEQ ID NO: 21051 - protein, 8 aa, Homo sapiens
  AACR GENIE Results; ALK_p.R41L; B3501
QPLEPLSY

SEQ ID NO: 21052 - protein, 8 aa, Homo sapiens
  AACR GENIE Results; APC_p.A1296Qfs*9; B1302
NQTTQEQI

SEQ ID NO: 21053 - protein, 9 aa, Homo sapiens
  AACR GENIE Results; APC_p.A1296Qfs*9; C1502
TTQEQILLI

SEQ ID NO: 21054 - protein, 9 aa, Homo sapiens
  AACR GENIE Results; APC_p.A1296Qfs*9; B3801
NQTTQEQIL

SEQ ID NO: 21055 - protein, 9 aa, Homo sapiens
  AACR GENIE Results; APC_p.A1492Cfs*22; C1502
YSRWIFLFI

SEQ ID NO: 21056 - protein, 10 aa, Homo sapiens
  AACR GENIE Results; APC_p.A1492Cfs*22; B2702
FIQPECSEPR

SEQ ID NO: 21057 - protein, 9 aa, Homo sapiens
  AACR GENIE Results; APC_p.A1492Cfs*22; A2301
KYSRWIFLF

SEQ ID NO: 21058 - protein, 9 aa, Homo sapiens
  AACR GENIE Results; APC_p.A1492Cfs*22; A3101
IQPECSEPR

SEQ ID NO: 21059 - protein, 9 aa, Homo sapiens
  AACR GENIE Results; APC_p.A1492Cfs*22; A6801
IQPECSEPR

SEQ ID NO: 21060 - protein, 9 aa, Homo sapiens
  AACR GENIE Results; APC_p.A1492Cfs*22; A1101
IQPECSEPR

SEQ ID NO: 21061 - protein, 8 aa, Homo sapiens
  AACR GENIE Results; APC_p.A1492Pfs*15; B3701
MDFLVHPA

SEQ ID NO: 21062 - protein, 9 aa, Homo sapiens
  AACR GENIE Results; APC_p.A1492Pfs*15; A0201
QMDFLVHPA

SEQ ID NO: 21063 - protein, 8 aa, Homo sapiens
  AACR GENIE Results; APC_p.A1492Pfs*15; B4002
MDFLVHPA

SEQ ID NO: 21064 - protein, 9 aa, Homo sapiens
  AACR GENIE Results; APC_p.A1492Pfs*15; B5001
QMDFLVHPA

SEQ ID NO: 21065 - protein, 9 aa, Homo sapiens
  AACR GENIE Results; APC_p.A1492Pfs*15; C1402
HFPRKVLQM

SEQ ID NO: 21066 - protein, 9 aa, Homo sapiens
  AACR GENIE Results; APC_p.A1492Pfs*15; A6802
QMDFLVHPA

SEQ ID NO: 21067 - protein, 8 aa, Homo sapiens
  AACR GENIE Results; APC_p.A1492Pfs*15; B1801
MDFLVHPA

SEQ ID NO: 21068 - protein, 8 aa, Homo sapiens
  AACR GENIE Results; APC_p.A1492Pfs*15; B5001
MDFLVHPA

SEQ ID NO: 21069 - protein, 10 aa, Homo sapiens
  AACR GENIE Results; APC_p.A1492Pfs*15; A3303
DADTLLHFPR

SEQ ID NO: 21070 - protein, 9 aa, Homo sapiens
  AACR GENIE Results; APC_p.D1486Ifs*21; A0201
QMDFLVHPA

SEQ ID NO: 21071 - protein, 8 aa, Homo sapiens
  AACR GENIE Results; APC_p.D1486Ifs*21; B3501
LPDAILYY

SEQ ID NO: 21072 - protein, 9 aa, Homo sapiens
  AACR GENIE Results; APC_p.D1486Ifs*21; C0602
LYYILPRKV

SEQ ID NO: 21073 - protein, 9 aa, Homo sapiens
  AACR GENIE Results; APC_p.D1486Ifs*21; A2902
VLPDAILYY

SEQ ID NO: 21074 - protein, 8 aa, Homo sapiens
  AACR GENIE Results; APC_p.D1486Ifs*21; B1801
MDFLVHPA

SEQ ID NO: 21075 - protein, 9 aa, Homo sapiens
  AACR GENIE Results; APC_p.D1486Ifs*21; A2301
YYILPRKVL

SEQ ID NO: 21076 - protein, 11 aa, Homo sapiens
  AACR GENIE Results; APC_p.D1562Gfs*5; A3101
KTIDSEKGPIR

SEQ ID NO: 21077 - protein, 11 aa, Homo sapiens
  AACR GENIE Results; APC_p.D1562Gfs*5; A1101
KTIDSEKGPIR

SEQ ID NO: 21078 - protein, 11 aa, Homo sapiens
  AACR GENIE Results; APC_p.D1562Gfs*5; A6801
KTIDSEKGPIR

SEQ ID NO: 21079 - protein, 11 aa, Homo sapiens
  AACR GENIE Results; APC_p.D1562Gfs*5; B5701
KTIDSEKGPIR

SEQ ID NO: 21080 - protein, 9 aa, Homo sapiens
  AACR GENIE Results; APC_p.D1562Gfs*5; C0802
TIDSEKGPI

SEQ ID NO: 21081 - protein, 8 aa, Homo sapiens
  AACR GENIE Results; APC_p.D170Vfs*4; B5701
LTKRIVFL

SEQ ID NO: 21082 - protein, 8 aa, Homo sapiens
  AACR GENIE Results; APC_p.D170Vfs*4; C1203
LTKRIVFL

SEQ ID NO: 21083 - protein, 9 aa, Homo sapiens
  AACR GENIE Results; APC_p.D842Vfs*18; A1101
GSLVLVLKK

SEQ ID NO: 21084 - protein, 9 aa, Homo sapiens
  AACR GENIE Results; APC_p.D842Vfs*18; B5701
LVLKKIEVW

SEQ ID NO: 21085 - protein, 8 aa, Homo sapiens
  AACR GENIE Results; APC_p.D842Vfs*18; A1101
GSLVLVLK

SEQ ID NO: 21086 - protein, 9 aa, Homo sapiens
  AACR GENIE Results; APC_p.D842Vfs*18; C0602
SRGSLVLVL

SEQ ID NO: 21087 - protein, 9 aa, Homo sapiens
  AACR GENIE Results; APC_p.D842Vfs*18; C0701
SRGSLVLVL

SEQ ID NO: 21088 - protein, 8 aa, Homo sapiens
  AACR GENIE Results; APC_p.D842Vfs*18; B5701
VLKKIEVW

SEQ ID NO: 21089 - protein, 9 aa, Homo sapiens
  AACR GENIE Results; APC_p.D842Vfs*18; B2705
SRGSLVLVL

SEQ ID NO: 21090 - protein, 9 aa, Homo sapiens
  AACR GENIE Results; APC_p.D842Vfs*18; C1502
SSSRGSLVL

SEQ ID NO: 21091 - protein, 11 aa, Homo sapiens
  AACR GENIE Results; APC_p.D842Vfs*18; A0301
SSRGSLVLVLK

SEQ ID NO: 21092 - protein, 9 aa, Homo sapiens
  AACR GENIE Results; APC_p.D842Vfs*18; A0301
GSLVLVLKK

SEQ ID NO: 21093 - protein, 11 aa, Homo sapiens
  AACR GENIE Results; APC_p.E1309Kfs*12; A3303
NTLQIAEIKKR

SEQ ID NO: 21094 - protein, 10 aa, Homo sapiens
  AACR GENIE Results; APC_p.E1309Kfs*12; A6801
NTLQIAEIKK

SEQ ID NO: 21095 - protein, 9 aa, Homo sapiens
  AACR GENIE Results; APC_p.E1309Kfs*12; B2705
KRLELGQLK

SEQ ID NO: 21096 - protein, 9 aa, Homo sapiens
  AACR GENIE Results; APC_p.E1309Kfs*12; B4002
AEIKKRLEL

SEQ ID NO: 21097 - protein, 10 aa, Homo sapiens
  AACR GENIE Results; APC_p.E1309Kfs*12; A1101
NTLQIAEIKK

SEQ ID NO: 21098 - protein, 9 aa, Homo sapiens
  AACR GENIE Results; APC_p.E1309Kfs*12; A6802
QIAEIKKRL

SEQ ID NO: 21099 - protein, 9 aa, Homo sapiens
  AACR GENIE Results; APC_p.E1309Kfs*5; B5701
QIAEIKKDW

SEQ ID NO: 21100 - protein, 10 aa, Homo sapiens
  AACR GENIE Results; APC_p.E1309Kfs*5; A6801
NTLQIAEIKK

SEQ ID NO: 21101 - protein, 9 aa, Homo sapiens
  AACR GENIE Results; APC_p.E1309Kfs*5; B4403
QIAEIKKDW

SEQ ID NO: 21102 - protein, 10 aa, Homo sapiens
  AACR GENIE Results; APC_p.E1309Rfs*6; A6801
NTLQIAEIKR

SEQ ID NO: 21103 - protein, 9 aa, Homo sapiens
  AACR GENIE Results; APC_p.E1353Dfs*62; A0201
CLADVLLSV

SEQ ID NO: 21104 - protein, 11 aa, Homo sapiens
  AACR GENIE Results; APC_p.E1353Dfs*62; B5701
APFRVNHAVEW

SEQ ID NO: 21105 - protein, 9 aa, Homo sapiens
  AACR GENIE Results; APC_p.E1353Dfs*62; B5101
DVLLSVHLI

SEQ ID NO: 21106 - protein, 9 aa, Homo sapiens
  AACR GENIE Results; APC_p.E1353Dfs*62; B4901
QERNLPPKV

SEQ ID NO: 21107 - protein, 9 aa, Homo sapiens
  AACR GENIE Results; APC_p.E1353Dfs*62; B1302
CLADVLLSV

SEQ ID NO: 21108 - protein, 9 aa, Homo sapiens
  AACR GENIE Results; APC_p.E1353Dfs*62; A3001
QERNLPPKV

SEQ ID NO: 21109 - protein, 9 aa, Homo sapiens
  AACR GENIE Results; APC_p.E1353Dfs*62; A6802
SVHLIVLRV

SEQ ID NO: 21110 - protein, 9 aa, Homo sapiens
  AACR GENIE Results; APC_p.E1353Dfs*62; A3101
VVRLPAPFR

SEQ ID NO: 21111 - protein, 9 aa, Homo sapiens
  AACR GENIE Results; APC_p.E1353Dfs*62; A3101
KAVDFLQER

SEQ ID NO: 21112 - protein, 9 aa, Homo sapiens
  AACR GENIE Results; APC_p.E1353Dfs*62; C1502
SVHLIVLRV

SEQ ID NO: 21113 - protein, 9 aa, Homo sapiens
  AACR GENIE Results; APC_p.E1353Dfs*62; C0602
FRVNHAVEW

SEQ ID NO: 21114 - protein, 8 aa, Homo sapiens
  AACR GENIE Results; APC_p.E1353Dfs*62; B5701
RVNHAVEW

SEQ ID NO: 21115 - protein, 9 aa, Homo sapiens
  AACR GENIE Results; APC_p.E1353Dfs*62; B3701
ADVLLSVHL

SEQ ID NO: 21116 - protein, 9 aa, Homo sapiens
  AACR GENIE Results; APC_p.E1353Dfs*62; B4002
ADVLLSVHL

SEQ ID NO: 21117 - protein, 9 aa, Homo sapiens
  AACR GENIE Results; APC_p.E1353Dfs*62; C0602
VRLPAPFRV

SEQ ID NO: 21118 - protein, 9 aa, Homo sapiens
  AACR GENIE Results; APC_p.E1353Dfs*62; B0702
HPKVHLNTM

SEQ ID NO: 21119 - protein, 9 aa, Homo sapiens
  AACR GENIE Results; APC_p.E1353Dfs*62; B4002
QERNLPPKV

SEQ ID NO: 21120 - protein, 9 aa, Homo sapiens
  AACR GENIE Results; APC_p.E1353Dfs*62; B1302
SVHLIVLRV

SEQ ID NO: 21121 - protein, 11 aa, Homo sapiens
  AACR GENIE Results; APC_p.E1353Dfs*62; B4002
QERNLPPKVVL

SEQ ID NO: 21122 - protein, 9 aa, Homo sapiens
  AACR GENIE Results; APC_p.E1353Dfs*62; A0205
CLADVLLSV

SEQ ID NO: 21123 - protein, 9 aa, Homo sapiens
  AACR GENIE Results; APC_p.E1353Dfs*62; A6802
DVLLSVHLI

SEQ ID NO: 21124 - protein, 9 aa, Homo sapiens
  AACR GENIE Results; APC_p.E1353Dfs*62; B5701
RVVRLPAPF

SEQ ID NO: 21125 - protein, 9 aa, Homo sapiens
  AACR GENIE Results; APC_p.E1353Dfs*62; B0801
HPKVHLNTM

SEQ ID NO: 21126 - protein, 8 aa, Homo sapiens
  AACR GENIE Results; APC_p.E1353Dfs*62; B0801
NLPPKVVL

SEQ ID NO: 21127 - protein, 8 aa, Homo sapiens
  AACR GENIE Results; APC_p.E1353Dfs*62; A3101
SVHLIVLR

SEQ ID NO: 21128 - protein, 9 aa, Homo sapiens
  AACR GENIE Results; APC_p.E1353Dfs*62; B5701
KAVDFLQER

SEQ ID NO: 21129 - protein, 10 aa, Homo sapiens
  AACR GENIE Results; APC_p.E1353Dfs*62; A3101
RNLPPKVVLR

SEQ ID NO: 21130 - protein, 9 aa, Homo sapiens
  AACR GENIE Results; APC_p.E1353Dfs*62; A3303
KAVDFLQER

SEQ ID NO: 21131 - protein, 9 aa, Homo sapiens
  AACR GENIE Results; APC_p.E1353Dfs*62; C0702
FRVNHAVEW

SEQ ID NO: 21132 - protein, 9 aa, Homo sapiens
  AACR GENIE Results; APC_p.E1353Dfs*62; A0301
VVRLPAPFR

SEQ ID NO: 21133 - protein, 9 aa, Homo sapiens
  AACR GENIE Results; APC_p.E1353Dfs*62; A0201
FLQERNLPP

SEQ ID NO: 21134 - protein, 8 aa, Homo sapiens
  AACR GENIE Results; APC_p.E1353Dfs*62; A3303
SVHLIVLR

SEQ ID NO: 21135 - protein, 9 aa, Homo sapiens
  AACR GENIE Results; APC_p.E1353Dfs*62; A6801
KAVDFLQER

SEQ ID NO: 21136 - protein, 9 aa, Homo sapiens
  AACR GENIE Results; APC_p.E1353Dfs*62; B2705
FRVNHAVEW

SEQ ID NO: 21137 - protein, 8 aa, Homo sapiens
  AACR GENIE Results; APC_p.E1353Dfs*62; B5501
APFRVNHA

SEQ ID NO: 21138 - protein, 8 aa, Homo sapiens
  AACR GENIE Results; APC_p.E1353Vfs*21; B4403
SEISLQKW

SEQ ID NO: 21139 - protein, 9 aa, Homo sapiens
  AACR GENIE Results; APC_p.E1353Vfs*21; C1402
VFFRSEISL

SEQ ID NO: 21140 - protein, 8 aa, Homo sapiens
  AACR GENIE Results; APC_p.E1353Vfs*21; B4402
SEISLQKW

SEQ ID NO: 21141 - protein, 9 aa, Homo sapiens
  AACR GENIE Results; APC_p.E1353Vfs*21; B5701
RSEISLQKW

SEQ ID NO: 21142 - protein, 9 aa, Homo sapiens
  AACR GENIE Results; APC_p.E1353Vfs*21; B5801
RSEISLQKW

SEQ ID NO: 21143 - protein, 9 aa, Homo sapiens
  AACR GENIE Results; APC_p.E1353Vfs*21; B2705
FRSEISLQK

SEQ ID NO: 21144 - protein, 8 aa, Homo sapiens
  AACR GENIE Results; APC_p.E1353Vfs*21; A2301
SEISLQKW

SEQ ID NO: 21145 - protein, 8 aa, Homo sapiens
  AACR GENIE Results; APC_p.E1353Vfs*21; B4002
SEISLQKW

SEQ ID NO: 21146 - protein, 9 aa, Homo sapiens
  AACR GENIE Results; APC_p.E1353Vfs*21; B2702
FRSEISLQK

SEQ ID NO: 21147 - protein, 8 aa, Homo sapiens
  AACR GENIE Results; APC_p.E1353Vfs*21; B5801
SEISLQKW

SEQ ID NO: 21148 - protein, 10 aa, Homo sapiens
  AACR GENIE Results; APC_p.E1464Vfs*8; B0702
APTAEKRVDL

SEQ ID NO: 21149 - protein, 9 aa, Homo sapiens
  AACR GENIE Results; APC_p.E1494Kfs*13; A3301
DTLLHFATK

SEQ ID NO: 21150 - protein, 9 aa, Homo sapiens
  AACR GENIE Results; APC_p.E1494Kfs*13; A0201
QMDFLVHPA

SEQ ID NO: 21151 - protein, 8 aa, Homo sapiens
  AACR GENIE Results; APC_p.E1494Kfs*13; B3701
MDFLVHPA

SEQ ID NO: 21152 - protein, 9 aa, Homo sapiens
  AACR GENIE Results; APC_p.E1494Kfs*13; A3303
DTLLHFATK

SEQ ID NO: 21153 - protein, 9 aa, Homo sapiens
  AACR GENIE Results; APC_p.E1494Kfs*13; B5701
ATKVLQMDF

SEQ ID NO: 21154 - protein, 9 aa, Homo sapiens
  AACR GENIE Results; APC_p.E1494Kfs*13; C1402
HFATKVLQM

SEQ ID NO: 21155 - protein, 9 aa, Homo sapiens
  AACR GENIE Results; APC_p.E1494Kfs*13; A0205
QMDFLVHPA

SEQ ID NO: 21156 - protein, 9 aa, Homo sapiens
  AACR GENIE Results; APC_p.E1494Kfs*13; B5001
QMDFLVHPA

SEQ ID NO: 21157 - protein, 8 aa, Homo sapiens
  AACR GENIE Results; APC_p.E1494Kfs*13; B4002
MDFLVHPA

SEQ ID NO: 21158 - protein, 9 aa, Homo sapiens
  AACR GENIE Results; APC_p.E1494Kfs*13; A6802
QMDFLVHPA

SEQ ID NO: 21159 - protein, 9 aa, Homo sapiens
  AACR GENIE Results; APC_p.E1494Kfs*13; A6801
DTLLHFATK

SEQ ID NO: 21160 - protein, 9 aa, Homo sapiens
  AACR GENIE Results; APC_p.E1494Kfs*13; A1101
DTLLHFATK

SEQ ID NO: 21161 - protein, 10 aa, Homo sapiens
  AACR GENIE Results; APC_p.E1494Kfs*13; B5001
LQMDFLVHPA

SEQ ID NO: 21162 - protein, 9 aa, Homo sapiens
  AACR GENIE Results; APC_p.E1494Kfs*13; B1501
ATKVLQMDF

SEQ ID NO: 21163 - protein, 10 aa, Homo sapiens
  AACR GENIE Results; APC_p.E1494Kfs*13; A0201
LQMDFLVHPA

SEQ ID NO: 21164 - protein, 8 aa, Homo sapiens
  AACR GENIE Results; APC_p.E1494Kfs*13; B1801
MDFLVHPA

SEQ ID NO: 21165 - protein, 8 aa, Homo sapiens
  AACR GENIE Results; APC_p.E1494Kfs*13; B5001
MDFLVHPA

SEQ ID NO: 21166 - protein, 9 aa, Homo sapiens
  AACR GENIE Results; APC_p.E1494Vfs*12; A0201
QMDFLVHPA

SEQ ID NO: 21167 - protein, 9 aa, Homo sapiens
  AACR GENIE Results; APC_p.E1494Vfs*12; B5101
DTLLHFATV

SEQ ID NO: 21168 - protein, 8 aa, Homo sapiens
  AACR GENIE Results; APC_p.E1494Vfs*12; B1801
MDFLVHPA

SEQ ID NO: 21169 - protein, 9 aa, Homo sapiens
  AACR GENIE Results; APC_p.E1494Vfs*12; A3101
QMDFLVHPA

SEQ ID NO: 21170 - protein, 9 aa, Homo sapiens
  AACR GENIE Results; APC_p.E1494Vfs*12; B3501
FATVLQMDF

SEQ ID NO: 21171 - protein, 9 aa, Homo sapiens
  AACR GENIE Results; APC_p.E1494Vfs*12; C1601
FATVLQMDF

SEQ ID NO: 21172 - protein, 9 aa, Homo sapiens
  AACR GENIE Results; APC_p.E403Kfs*51; A3101
TVKPVGSGR

SEQ ID NO: 21173 - protein, 9 aa, Homo sapiens
  AACR GENIE Results; APC_p.E403Kfs*51; A6801
TVKPVGSGR

SEQ ID NO: 21174 - protein, 9 aa, Homo sapiens
  AACR GENIE Results; APC_p.E403Kfs*51; B1302
IQCQLLLNI

SEQ ID NO: 21175 - protein, 9 aa, Homo sapiens
  AACR GENIE Results; APC_p.E403Kfs*51; B0702
KPVGSGRKL

SEQ ID NO: 21176 - protein, 8 aa, Homo sapiens
  AACR GENIE Results; APC_p.E403Kfs*51; B5101
YALTVKPV

SEQ ID NO: 21177 - protein, 10 aa, Homo sapiens
  AACR GENIE Results; APC_p.E403Kfs*51; A6801
LTVKPVGSGR

SEQ ID NO: 21178 - protein, 9 aa, Homo sapiens
  AACR GENIE Results; APC_p.E403Kfs*51; C0602
IRSVLLCVF

SEQ ID NO: 21179 - protein, 9 aa, Homo sapiens
  AACR GENIE Results; APC_p.E403Kfs*51; A0301
TVKPVGSGR

SEQ ID NO: 21180 - protein, 9 aa, Homo sapiens
  AACR GENIE Results; APC_p.E403Kfs*51; B2705
TRTKIQCQL

SEQ ID NO: 21181 - protein, 10 aa, Homo sapiens
  AACR GENIE Results; APC_p.E403Kfs*51; A0301
TVKPVGSGRK

SEQ ID NO: 21182 - protein, 8 aa, Homo sapiens
  AACR GENIE Results; APC_p.E403Kfs*51; B0801
LLNIRSVL

SEQ ID NO: 21183 - protein, 9 aa, Homo sapiens
  AACR GENIE Results; APC_p.E403Kfs*51; C0701
RRKSESFIF

SEQ ID NO: 21184 - protein, 10 aa, Homo sapiens
  AACR GENIE Results; APC_p.E403Kfs*51; A0201
LLLNIRSVLL

SEQ ID NO: 21185 - protein, 9 aa, Homo sapiens
  AACR GENIE Results; APC_p.E403Kfs*51; A1101
TVKPVGSGR

SEQ ID NO: 21186 - protein, 9 aa, Homo sapiens
  AACR GENIE Results; APC_p.E403Kfs*51; A3001
TVKPVGSGR

SEQ ID NO: 21187 - protein, 8 aa, Homo sapiens
  AACR GENIE Results; APC_p.E403Kfs*51; B5701
KSESFIFW

SEQ ID NO: 21188 - protein, 9 aa, Homo sapiens
  AACR GENIE Results; APC_p.E403Kfs*51; C0702
IRSVLLCVF

SEQ ID NO: 21189 - protein, 10 aa, Homo sapiens
  AACR GENIE Results; APC_p.E403Kfs*51; A3101
LTVKPVGSGR

SEQ ID NO: 21190 - protein, 10 aa, Homo sapiens
  AACR GENIE Results; APC_p.E403Kfs*51; A1101
LTVKPVGSGR

SEQ ID NO: 21191 - protein, 11 aa, Homo sapiens
  AACR GENIE Results; APC_p.F1396Lfs*19; B5701
APFRVNHAVEW

SEQ ID NO: 21192 - protein, 9 aa, Homo sapiens
  AACR GENIE Results; APC_p.F1396Lfs*19; A3101
VVRLPAPFR

SEQ ID NO: 21193 - protein, 9 aa, Homo sapiens
  AACR GENIE Results; APC_p.F1396Lfs*19; C0602
FRVNHAVEW

SEQ ID NO: 21194 - protein, 8 aa, Homo sapiens
  AACR GENIE Results; APC_p.F1396Lfs*19; B5701
RVNHAVEW

SEQ ID NO: 21195 - protein, 10 aa, Homo sapiens
  AACR GENIE Results; APC_p.F1396Lfs*19; A3101
SSLDSLRVVR

SEQ ID NO: 21196 - protein, 9 aa, Homo sapiens
  AACR GENIE Results; APC_p.F1396Lfs*19; C1502
SSLDSLRVV

SEQ ID NO: 21197 - protein, 9 aa, Homo sapiens
  AACR GENIE Results; APC_p.F1396Lfs*19; B5701
RVVRLPAPF

SEQ ID NO: 21198 - protein, 9 aa, Homo sapiens
  AACR GENIE Results; APC_p.F1396Lfs*19; C0602
VRLPAPFRV

SEQ ID NO: 21199 - protein, 9 aa, Homo sapiens
  AACR GENIE Results; APC_p.F1396Lfs*19; C0702
FRVNHAVEW

SEQ ID NO: 21200 - protein, 9 aa, Homo sapiens
  AACR GENIE Results; APC_p.F1396Lfs*19; C1203
SSLDSLRVV

SEQ ID NO: 21201 - protein, 9 aa, Homo sapiens
  AACR GENIE Results; APC_p.F1396Lfs*19; A6801
SVSSLDSLR

SEQ ID NO: 21202 - protein, 9 aa, Homo sapiens
  AACR GENIE Results; APC_p.F1396Lfs*19; A3101
SLDSLRVVR

SEQ ID NO: 21203 - protein, 9 aa, Homo sapiens
  AACR GENIE Results; APC_p.F1396Lfs*19; A0301
VVRLPAPFR

SEQ ID NO: 21204 - protein, 9 aa, Homo sapiens
  AACR GENIE Results; APC_p.F1396Lfs*19; B2705
FRVNHAVEW

SEQ ID NO: 21205 - protein, 9 aa, Homo sapiens
  AACR GENIE Results; APC_p.F1396Lfs*19; C0602
SSLDSLRVV

SEQ ID NO: 21206 - protein, 9 aa, Homo sapiens
  AACR GENIE Results; APC_p.F1491Lfs*16; A0201
QMDFLVHPA

SEQ ID NO: 21207 - protein, 10 aa, Homo sapiens
  AACR GENIE Results; APC_p.F1491Lfs*16; B3503
LPDADTLLHL

SEQ ID NO: 21208 - protein, 8 aa, Homo sapiens
  AACR GENIE Results; APC_p.F1491Lfs*16; B4002
MDFLVHPA

SEQ ID NO: 21209 - protein, 8 aa, Homo sapiens
  AACR GENIE Results; APC_p.F1491Lfs*16; B5101
DADTLLHL

SEQ ID NO: 21210 - protein, 9 aa, Homo sapiens
  AACR GENIE Results; APC_p.F1491Lfs*16; A6802
QMDFLVHPA

SEQ ID NO: 21211 - protein, 10 aa, Homo sapiens
  AACR GENIE Results; APC_p.F1491Lfs*16; B2702
DADTLLHLPR

SEQ ID NO: 21212 - protein, 8 aa, Homo sapiens
  AACR GENIE Results; APC_p.F1491Lfs*16; B1801
MDFLVHPA

SEQ ID NO: 21213 - protein, 9 aa, Homo sapiens
  AACR GENIE Results; APC_p.G1428Dfs*45; B1501
KQLKPSEKY

SEQ ID NO: 21214 - protein, 9 aa, Homo sapiens
  AACR GENIE Results; APC_p.G1428Dfs*45; A2301
KYLKIKHLL

SEQ ID NO: 21215 - protein, 10 aa, Homo sapiens
  AACR GENIE Results; APC_p.G1428Dfs*45; A2301
KYLKIKHLLL

SEQ ID NO: 21216 - protein, 9 aa, Homo sapiens
  AACR GENIE Results; APC_p.G1428Dfs*45; B4403
AEVKHLHHL

SEQ ID NO: 21217 - protein, 9 aa, Homo sapiens
  AACR GENIE Results; APC_p.G1428Dfs*45; B0702
KPSEKYLKI

SEQ ID NO: 21218 - protein, 9 aa, Homo sapiens
  AACR GENIE Results; APC_p.H1490Lfs*17; B3503
LPDADTLLL

SEQ ID NO: 21219 - protein, 9 aa, Homo sapiens
  AACR GENIE Results; APC_p.H1490Lfs*17; A0201
QMDFLVHPA

SEQ ID NO: 21220 - protein, 8 aa, Homo sapiens
  AACR GENIE Results; APC_p.H1490Lfs*17; B4002
MDFLVHPA

SEQ ID NO: 21221 - protein, 9 aa, Homo sapiens
  AACR GENIE Results; APC_p.H1490Lfs*17; A6802
QMDFLVHPA

SEQ ID NO: 21222 - protein, 9 aa, Homo sapiens
  AACR GENIE Results; APC_p.H1490Lfs*17; B3501
LPDADTLLL

SEQ ID NO: 21223 - protein, 10 aa, Homo sapiens
  AACR GENIE Results; APC_p.H1490Lfs*17; B2702
DADTLLLLPR

SEQ ID NO: 21224 - protein, 10 aa, Homo sapiens
  AACR GENIE Results; APC_p.H1490Lfs*17; B3503
LPDADTLLLL

SEQ ID NO: 21225 - protein, 8 aa, Homo sapiens
  AACR GENIE Results; APC_p.H1490Lfs*17; B1801
MDFLVHPA

SEQ ID NO: 21226 - protein, 10 aa, Homo sapiens
  AACR GENIE Results; APC_p.I1307Nfs*8; A6801
NTLQIAENKR

SEQ ID NO: 21227 - protein, 9 aa, Homo sapiens
  AACR GENIE Results; APC_p.I1307Nfs*8; A1101
NTLQIAENK

SEQ ID NO: 21228 - protein, 9 aa, Homo sapiens
  AACR GENIE Results; APC_p.I1307Nfs*8; A6801
NTLQIAENK

SEQ ID NO: 21229 - protein, 11 aa, Homo sapiens
  AACR GENIE Results; APC_p.I1307Nfs*8; A6801
DSANTLQIAEN

SEQ ID NO: 21230 - protein, 11 aa, Homo sapiens
  AACR GENIE Results; APC_p.I1307Nfs*8; A1101
SANTLQIAENK

SEQ ID NO: 21231 - protein, 9 aa, Homo sapiens
  AACR GENIE Results; APC_p.I1311Lfs*10; B4001
AEIKEKLEL

SEQ ID NO: 21232 - protein, 9 aa, Homo sapiens
  AACR GENIE Results; APC_p.I1311Lfs*10; B4403
AEIKEKLEL

SEQ ID NO: 21233 - protein, 8 aa, Homo sapiens
  AACR GENIE Results; APC_p.I1311Lfs*10; B0801
EIKEKLEL

SEQ ID NO: 21234 - protein, 9 aa, Homo sapiens
  AACR GENIE Results; APC_p.I1311Lfs*10; B4402
AEIKEKLEL

SEQ ID NO: 21235 - protein, 9 aa, Homo sapiens
  AACR GENIE Results; APC_p.K1310Dfs*4; B5801
QIAEIKEDW

SEQ ID NO: 21236 - protein, 9 aa, Homo sapiens
  AACR GENIE Results; APC_p.K1310Dfs*4; B5701
QIAEIKEDW

SEQ ID NO: 21237 - protein, 9 aa, Homo sapiens
  AACR GENIE Results; APC_p.K1310Dfs*4; B4403
QIAEIKEDW

SEQ ID NO: 21238 - protein, 9 aa, Homo sapiens
  AACR GENIE Results; APC_p.K1310Dfs*4; B3501
QIAEIKEDW

SEQ ID NO: 21239 - protein, 9 aa, Homo sapiens
  AACR GENIE Results; APC_p.K1310Dfs*4; B2702
QIAEIKEDW

SEQ ID NO: 21240 - protein, 9 aa, Homo sapiens
  AACR GENIE Results; APC_p.K1310Rfs*11; A0205
QIAEIKERL

SEQ ID NO: 21241 - protein, 11 aa, Homo sapiens
  AACR GENIE Results; APC_p.K1310Rfs*11; A3301
NTLQIAEIKER

SEQ ID NO: 21242 - protein, 9 aa, Homo sapiens
  AACR GENIE Results; APC_p.K1310Rfs*11; B4001
AEIKERLEL

SEQ ID NO: 21243 - protein, 9 aa, Homo sapiens
  AACR GENIE Results; APC_p.K1310Rfs*11; B4403
AEIKERLEL

SEQ ID NO: 21244 - protein, 9 aa, Homo sapiens
  AACR GENIE Results; APC_p.K1310Rfs*11; B4002
AEIKERLEL

SEQ ID NO: 21245 - protein, 9 aa, Homo sapiens
  AACR GENIE Results; APC_p.K1310Rfs*11; A6802
QIAEIKERL

SEQ ID NO: 21246 - protein, 11 aa, Homo sapiens
  AACR GENIE Results; APC_p.K1310Rfs*11; A3303
NTLQIAEIKER

SEQ ID NO: 21247 - protein, 9 aa, Homo sapiens
  AACR GENIE Results; APC_p.K1310Rfs*11; B5001
QIAEIKERL

SEQ ID NO: 21248 - protein, 9 aa, Homo sapiens
  AACR GENIE Results; APC_p.K1310Rfs*11; B4901
AEIKERLEL

SEQ ID NO: 21249 - protein, 11 aa, Homo sapiens
  AACR GENIE Results; APC_p.K1310Rfs*11; A6801
NTLQIAEIKER

SEQ ID NO: 21250 - protein, 9 aa, Homo sapiens
  AACR GENIE Results; APC_p.K1310Rfs*11; B3801
QIAEIKERL

SEQ ID NO: 21251 - protein, 9 aa, Homo sapiens
  AACR GENIE Results; APC_p.K1310Rfs*11; A3001
AEIKERLEL

SEQ ID NO: 21252 - protein, 9 aa, Homo sapiens
  AACR GENIE Results; APC_p.K1310Rfs*11; B4002
LELGQLKIL

SEQ ID NO: 21253 - protein, 9 aa, Homo sapiens
  AACR GENIE Results; APC_p.K1310Rfs*11; B0702
AEIKERLEL

SEQ ID NO: 21254 - protein, 9 aa, Homo sapiens
  AACR GENIE Results; APC_p.K1449Sfs*24; A2301
KYLKIKHLL

SEQ ID NO: 21255 - protein, 9 aa, Homo sapiens
  AACR GENIE Results; APC_p.K1449Sfs*24; B1501
QTAQTSEKY

SEQ ID NO: 21256 - protein, 11 aa, Homo sapiens
  AACR GENIE Results; APC_p.K1449Sfs*24; A1101
QTAQTSEKYLK

SEQ ID NO: 21257 - protein, 10 aa, Homo sapiens
  AACR GENIE Results; APC_p.K1449Sfs*24; A2301
KYLKIKHLLL

SEQ ID NO: 21258 - protein, 9 aa, Homo sapiens
  AACR GENIE Results; APC_p.K1449Sfs*24; A1101
AQTSEKYLK

SEQ ID NO: 21259 - protein, 9 aa, Homo sapiens
  AACR GENIE Results; APC_p.K1449Sfs*24; A0101
QTAQTSEKY

SEQ ID NO: 21260 - protein, 10 aa, Homo sapiens
  AACR GENIE Results; APC_p.K1449Sfs*24; A1101
TAQTSEKYLK

SEQ ID NO: 21261 - protein, 9 aa, Homo sapiens
  AACR GENIE Results; APC_p.K1449Sfs*24; C1502
QTSEKYLKI

SEQ ID NO: 21262 - protein, 9 aa, Homo sapiens
  AACR GENIE Results; APC_p.K1449Sfs*24; B1302
QTSEKYLKI

SEQ ID NO: 21263 - protein, 9 aa, Homo sapiens
  AACR GENIE Results; APC_p.K1449Sfs*24; A6801
QTSEKYLKI

SEQ ID NO: 21264 - protein, 8 aa, Homo sapiens
  AACR GENIE Results; APC_p.K1449Sfs*24; A2301
KYLKIKHL

SEQ ID NO: 21265 - protein, 11 aa, Homo sapiens
  AACR GENIE Results; APC_p.L1302Rfs*3; A6801
TTQEADSANTR

SEQ ID NO: 21266 - protein, 11 aa, Homo sapiens
  AACR GENIE Results; APC_p.L1302Rfs*3; A3303
TTQEADSANTR

SEQ ID NO: 21267 - protein, 11 aa, Homo sapiens
  AACR GENIE Results; APC_p.L1302Rfs*3; A3301
TTQEADSANTR

SEQ ID NO: 21268 - protein, 11 aa, Homo sapiens
  AACR GENIE Results; APC_p.L1302Rfs*3; A3101
TTQEADSANTR

SEQ ID NO: 21269 - protein, 11 aa, Homo sapiens
  AACR GENIE Results; APC_p.L1302Rfs*3; A1101
TTQEADSANTR

SEQ ID NO: 21270 - protein, 9 aa, Homo sapiens
  AACR GENIE Results; APC_p.L1488Ffs*23; C1502
YSRWIFLFI

SEQ ID NO: 21271 - protein, 9 aa, Homo sapiens
  AACR GENIE Results; APC_p.L1488Ffs*23; A2301
KYSRWIFLF

SEQ ID NO: 21272 - protein, 9 aa, Homo sapiens
  AACR GENIE Results; APC_p.L1488Ffs*23; A3101
IQPECSEPR

SEQ ID NO: 21273 - protein, 9 aa, Homo sapiens
  AACR GENIE Results; APC_p.L1488Ffs*23; A6801
IQPECSEPR

SEQ ID NO: 21274 - protein, 9 aa, Homo sapiens
  AACR GENIE Results; APC_p.L1488Ffs*23; A1101
IQPECSEPR

SEQ ID NO: 21275 - protein, 9 aa, Homo sapiens
  AACR GENIE Results; APC_p.L1488Yfs*18; A0201
QMDFLVHPA

SEQ ID NO: 21276 - protein, 9 aa, Homo sapiens
  AACR GENIE Results; APC_p.L1488Yfs*18; B3501
LPDADTYIL

SEQ ID NO: 21277 - protein, 9 aa, Homo sapiens
  AACR GENIE Results; APC_p.L1488Yfs*18; B5101
DTYILPRKV

SEQ ID NO: 21278 - protein, 9 aa, Homo sapiens
  AACR GENIE Results; APC_p.L1488Yfs*18; A6801
DADTYILPR

SEQ ID NO: 21279 - protein, 9 aa, Homo sapiens
  AACR GENIE Results; APC_p.L1488Yfs*18; B3501
QVLPDADTY

SEQ ID NO: 21280 - protein, 9 aa, Homo sapiens
  AACR GENIE Results; APC_p.L1488Yfs*18; C0802
LPDADTYIL

SEQ ID NO: 21281 - protein, 8 aa, Homo sapiens
  AACR GENIE Results; APC_p.L1488Yfs*18; B1801
MDFLVHPA

SEQ ID NO: 21282 - protein, 9 aa, Homo sapiens
  AACR GENIE Results; APC_p.L1488Yfs*18; A2301
TYILPRKVL

SEQ ID NO: 21283 - protein, 11 aa, Homo sapiens
  AACR GENIE Results; APC_p.L1488Yfs*18; B2702
LPDADTYILPR

SEQ ID NO: 21284 - protein, 8 aa, Homo sapiens
  AACR GENIE Results; APC_p.L1488Yfs*19; B3701
MDFLVHPA

SEQ ID NO: 21285 - protein, 10 aa, Homo sapiens
  AACR GENIE Results; APC_p.L1488Yfs*19; B3503
LPDADTYYIL

SEQ ID NO: 21286 - protein, 9 aa, Homo sapiens
  AACR GENIE Results; APC_p.L1488Yfs*19; A0201
QMDFLVHPA

SEQ ID NO: 21287 - protein, 9 aa, Homo sapiens
  AACR GENIE Results; APC_p.L1488Yfs*19; C0602
TYYILPRKV

SEQ ID NO: 21288 - protein, 9 aa, Homo sapiens
  AACR GENIE Results; APC_p.L1488Yfs*19; C1402
YYILPRKVL

SEQ ID NO: 21289 - protein, 8 aa, Homo sapiens
  AACR GENIE Results; APC_p.L1488Yfs*19; B4002
MDFLVHPA

SEQ ID NO: 21290 - protein, 8 aa, Homo sapiens
  AACR GENIE Results; APC_p.L1488Yfs*19; B3502
DADTYYIL

SEQ ID NO: 21291 - protein, 10 aa, Homo sapiens
  AACR GENIE Results; APC_p.L1488Yfs*19; A6802
DTYYILPRKV

SEQ ID NO: 21292 - protein, 9 aa, Homo sapiens
  AACR GENIE Results; APC_p.L1488Yfs*19; B5001
QMDFLVHPA

SEQ ID NO: 21293 - protein, 9 aa, Homo sapiens
  AACR GENIE Results; APC_p.L1488Yfs*19; A3301
DTYYILPRK

SEQ ID NO: 21294 - protein, 8 aa, Homo sapiens
  AACR GENIE Results; APC_p.L1488Yfs*19; B3503
DADTYYIL

SEQ ID NO: 21295 - protein, 9 aa, Homo sapiens
  AACR GENIE Results; APC_p.L1488Yfs*19; A0205
QMDFLVHPA

SEQ ID NO: 21296 - protein, 9 aa, Homo sapiens
  AACR GENIE Results; APC_p.L1488Yfs*19; A6802
QMDFLVHPA

SEQ ID NO: 21297 - protein, 10 aa, Homo sapiens
  AACR GENIE Results; APC_p.L1488Yfs*19; B2702
DADTYYILPR

SEQ ID NO: 21298 - protein, 8 aa, Homo sapiens
  AACR GENIE Results; APC_p.L1488Yfs*19; B1801
MDFLVHPA

SEQ ID NO: 21299 - protein, 10 aa, Homo sapiens
  AACR GENIE Results; APC_p.L1488Yfs*19; B3502
LPDADTYYIL

SEQ ID NO: 21300 - protein, 8 aa, Homo sapiens
  AACR GENIE Results; APC_p.L1488Yfs*19; B5001
MDFLVHPA

SEQ ID NO: 21301 - protein, 8 aa, Homo sapiens
  AACR GENIE Results; APC_p.L1489Ffs*18; B3701
MDFLVHPA

SEQ ID NO: 21302 - protein, 9 aa, Homo sapiens
  AACR GENIE Results; APC_p.L1489Ffs*18; A0201
QMDFLVHPA

SEQ ID NO: 21303 - protein, 9 aa, Homo sapiens
  AACR GENIE Results; APC_p.L1489Ffs*18; B3906
QMDFLVHPA

SEQ ID NO: 21304 - protein, 8 aa, Homo sapiens
  AACR GENIE Results; APC_p.L1489Ffs*18; B3906
MDFLVHPA

SEQ ID NO: 21305 - protein, 8 aa, Homo sapiens
  AACR GENIE Results; APC_p.L1489Ffs*18; B4002
MDFLVHPA

SEQ ID NO: 21306 - protein, 9 aa, Homo sapiens
  AACR GENIE Results; APC_p.L1489Ffs*18; B5001
QMDFLVHPA

SEQ ID NO: 21307 - protein, 8 aa, Homo sapiens
  AACR GENIE Results; APC_p.L1489Ffs*18; B3508
LPDADTLF

SEQ ID NO: 21308 - protein, 9 aa, Homo sapiens
  AACR GENIE Results; APC_p.L1489Ffs*18; A0205
QMDFLVHPA

SEQ ID NO: 21309 - protein, 10 aa, Homo sapiens
  AACR GENIE Results; APC_p.L1489Ffs*18; B3503
LPDADTLFIL

SEQ ID NO: 21310 - protein, 8 aa, Homo sapiens
  AACR GENIE Results; APC_p.L1489Ffs*18; B3502
LPDADTLF

SEQ ID NO: 21311 - protein, 9 aa, Homo sapiens
  AACR GENIE Results; APC_p.L1489Ffs*18; A6802
QMDFLVHPA

SEQ ID NO: 21312 - protein, 8 aa, Homo sapiens
  AACR GENIE Results; APC_p.L1489Ffs*18; B1801
MDFLVHPA

SEQ ID NO: 21313 - protein, 8 aa, Homo sapiens
  AACR GENIE Results; APC_p.L1489Ffs*18; B5001
MDFLVHPA

SEQ ID NO: 21314 - protein, 9 aa, Homo sapiens
  AACR GENIE Results; APC_p.L1489Yfs*18; A0201
QMDFLVHPA

SEQ ID NO: 21315 - protein, 8 aa, Homo sapiens
  AACR GENIE Results; APC_p.L1489Yfs*18; B1801
MDFLVHPA

SEQ ID NO: 21316 - protein, 9 aa, Homo sapiens
  AACR GENIE Results; APC_p.L1489Yfs*19; A0201
QMDFLVHPA

SEQ ID NO: 21317 - protein, 9 aa, Homo sapiens
  AACR GENIE Results; APC_p.L1489Yfs*19; B3501
LPDADTLYY

SEQ ID NO: 21318 - protein, 9 aa, Homo sapiens
  AACR GENIE Results; APC_p.L1489Yfs*19; A2301
YYILPRKVL

SEQ ID NO: 21319 - protein, 9 aa, Homo sapiens
  AACR GENIE Results; APC_p.L1489Yfs*19; B2702
DTLYYILPR

SEQ ID NO: 21320 - protein, 8 aa, Homo sapiens
  AACR GENIE Results; APC_p.L1489Yfs*19; B1801
MDFLVHPA

SEQ ID NO: 21321 - protein, 9 aa, Homo sapiens
  AACR GENIE Results; APC_p.L1489Yfs*19; A0301
TLYYILPRK

SEQ ID NO: 21322 - protein, 9 aa, Homo sapiens
  AACR GENIE Results; APC_p.L1489Yfs*19; C0602
LYYILPRKV

SEQ ID NO: 21323 - protein, 9 aa, Homo sapiens
  AACR GENIE Results; APC_p.L2574I; A6802
SSSSIISAS

SEQ ID NO: 21324 - protein, 9 aa, Homo sapiens
  AACR GENIE Results; APC_p.M1413Wfs*2; B1501
VQSEPCSGW

SEQ ID NO: 21325 - protein, 9 aa, Homo sapiens
  AACR GENIE Results; APC_p.M1413Wfs*2; A3201
VQSEPCSGW

SEQ ID NO: 21326 - protein, 9 aa, Homo sapiens
  AACR GENIE Results; APC_p.M1413Wfs*2; B3801
VQSEPCSGW

SEQ ID NO: 21327 - protein, 9 aa, Homo sapiens
  AACR GENIE Results; APC_p.M1413Wfs*2; B4403
VQSEPCSGW

SEQ ID NO: 21328 - protein, 9 aa, Homo sapiens
  AACR GENIE Results; APC_p.M1413Wfs*2; B5701
VQSEPCSGW

SEQ ID NO: 21329 - protein, 11 aa, Homo sapiens
  AACR GENIE Results; APC_p.M1413Wfs*2; B5701
SSVQSEPCSGW

SEQ ID NO: 21330 - protein, 9 aa, Homo sapiens
  AACR GENIE Results; APC_p.M1413Wfs*2; B4402
VQSEPCSGW

SEQ ID NO: 21331 - protein, 9 aa, Homo sapiens
  AACR GENIE Results; APC_p.M1431Cfs*42; B1501
KQLKPSEKY

SEQ ID NO: 21332 - protein, 9 aa, Homo sapiens
  AACR GENIE Results; APC_p.M1431Cfs*42; A2301
KYLKIKHLL

SEQ ID NO: 21333 - protein, 9 aa, Homo sapiens
  AACR GENIE Results; APC_p.M1431Cfs*42; B4403
AEVKHLHHL

SEQ ID NO: 21334 - protein, 10 aa, Homo sapiens
  AACR GENIE Results; APC_p.M1431Cfs*42; A2301
KYLKIKHLLL

SEQ ID NO: 21335 - protein, 9 aa, Homo sapiens
  AACR GENIE Results; APC_p.M1431Cfs*42; B0702
KPSEKYLKI

SEQ ID NO: 21336 - protein, 8 aa, Homo sapiens
  AACR GENIE Results; APC_p.M1431Cfs*42; B1501
HQAEVKHL

SEQ ID NO: 21337 - protein, 9 aa, Homo sapiens
  AACR GENIE Results; APC_p.M1431Cfs*42; B1302
GQTCHQAEV

SEQ ID NO: 21338 - protein, 9 aa, Homo sapiens
  AACR GENIE Results; APC_p.N1142S; B1801
YEDDKPTSY

SEQ ID NO: 21339 - protein, 9 aa, Homo sapiens
  AACR GENIE Results; APC_p.N1142S; B4403
YEDDKPTSY

SEQ ID NO: 21340 - protein, 9 aa, Homo sapiens
  AACR GENIE Results; APC_p.N1142S; A0101
YEDDKPTSY

SEQ ID NO: 21341 - protein, 9 aa, Homo sapiens
  AACR GENIE Results; APC_p.N1142S; B4402
YEDDKPTSY

SEQ ID NO: 21342 - protein, 9 aa, Homo sapiens
  AACR GENIE Results; APC_p.N1142S; B1501
YEDDKPTSY

SEQ ID NO: 21343 - protein, 9 aa, Homo sapiens
  AACR GENIE Results; APC_p.N1142S; B3501
YEDDKPTSY

SEQ ID NO: 21344 - protein, 9 aa, Homo sapiens
  AACR GENIE Results; APC_p.N1142S; B4001
YEDDKPTSY

SEQ ID NO: 21345 - protein, 9 aa, Homo sapiens
  AACR GENIE Results; APC_p.N1142S; B3501
KPTSYSERY

SEQ ID NO: 21346 - protein, 9 aa, Homo sapiens
  AACR GENIE Results; APC_p.N1142S; A2601
YEDDKPTSY

SEQ ID NO: 21347 - protein, 11 aa, Homo sapiens
  AACR GENIE Results; APC_p.N1142S; B1801
DDYEDDKPTSY

SEQ ID NO: 21348 - protein, 8 aa, Homo sapiens
  AACR GENIE Results; APC_p.N1142S; A0101
EDDKPTSY

SEQ ID NO: 21349 - protein, 9 aa, Homo sapiens
  AACR GENIE Results; APC_p.N1142S; B0801
YEDDKPTSY

SEQ ID NO: 21350 - protein, 8 aa, Homo sapiens
  AACR GENIE Results; APC_p.N1455Ifs*18; B0801
VPKIKHLL

SEQ ID NO: 21351 - protein, 9 aa, Homo sapiens
  AACR GENIE Results; APC_p.N1455Ifs*18; B4403
REVPKIKHL

SEQ ID NO: 21352 - protein, 9 aa, Homo sapiens
  AACR GENIE Results; APC_p.N1473Mfs*34; B1501
KQAAVMLQF

SEQ ID NO: 21353 - protein, 9 aa, Homo sapiens
  AACR GENIE Results; APC_p.N1473Mfs*34; A0201
QMDFLVHPA

SEQ ID NO: 21354 - protein, 9 aa, Homo sapiens
  AACR GENIE Results; APC_p.N1473Mfs*34; A3201
KQAAVMLQF

SEQ ID NO: 21355 - protein, 9 aa, Homo sapiens
  AACR GENIE Results; APC_p.N1473Mfs*34; A0301
ILYYILPRK

SEQ ID NO: 21356 - protein, 8 aa, Homo sapiens
  AACR GENIE Results; APC_p.N1473Mfs*34; B1801
MDFLVHPA

SEQ ID NO: 21357 - protein, 9 aa, Homo sapiens
  AACR GENIE Results; APC_p.N1473Mfs*34; C0602
LYYILPRKV

SEQ ID NO: 21358 - protein, 10 aa, Homo sapiens
  AACR GENIE Results; APC_p.N1531Mfs*34; A0301
GMKQNQSSLK

SEQ ID NO: 21359 - protein, 9 aa, Homo sapiens
  AACR GENIE Results; APC_p.N1531Mfs*34; B1501
GMKQNQSSL

SEQ ID NO: 21360 - protein, 8 aa, Homo sapiens
  AACR GENIE Results; APC_p.N1531Mfs*34; C1601
QSSLKNQM

SEQ ID NO: 21361 - protein, 9 aa, Homo sapiens
  AACR GENIE Results; APC_p.N1531Mfs*34; A3001
GMKQNQSSL

SEQ ID NO: 21362 - protein, 11 aa, Homo sapiens
  AACR GENIE Results; APC_p.N1531Mfs*34; B1501
KQNQSSLKNQM

SEQ ID NO: 21363 - protein, 9 aa, Homo sapiens
  AACR GENIE Results; APC_p.N1531Mfs*34; A0301
SLKNQMKTK

SEQ ID NO: 21364 - protein, 8 aa, Homo sapiens
  AACR GENIE Results; APC_p.N1531Mfs*34; B0801
QSSLKNQM

SEQ ID NO: 21365 - protein, 9 aa, Homo sapiens
  AACR GENIE Results; APC_p.N1531Mfs*34; C0602
KRQKKLLIL

SEQ ID NO: 21366 - protein, 9 aa, Homo sapiens
  AACR GENIE Results; APC_p.N1531Mfs*34; B3801
NQSSLKNQM

SEQ ID NO: 21367 - protein, 10 aa, Homo sapiens
  AACR GENIE Results; APC_p.N1531Mfs*34; A1101
SSLKNQMKTK

SEQ ID NO: 21368 - protein, 9 aa, Homo sapiens
  AACR GENIE Results; APC_p.N627Lfs*2; B0801
TLTYRSQTL

SEQ ID NO: 21369 - protein, 8 aa, Homo sapiens
  AACR GENIE Results; APC_p.N627Lfs*2; C0304
LTYRSQTL

SEQ ID NO: 21370 - protein, 8 aa, Homo sapiens
  AACR GENIE Results; APC_p.N627Lfs*2; C0303
LTYRSQTL

SEQ ID NO: 21371 - protein, 9 aa, Homo sapiens
  AACR GENIE Results; APC_p.N627Lfs*2; B0702
TLTYRSQTL

SEQ ID NO: 21372 - protein, 8 aa, Homo sapiens
  AACR GENIE Results; APC_p.N627Lfs*2; C1203
LTYRSQTL

SEQ ID NO: 21373 - protein, 8 aa, Homo sapiens
  AACR GENIE Results; APC_p.N627Lfs*2; B5701
LTYRSQTL

SEQ ID NO: 21374 - protein, 8 aa, Homo sapiens
  AACR GENIE Results; APC_p.N627Lfs*2; B0801
LTYRSQTL

SEQ ID NO: 21375 - protein, 9 aa, Homo sapiens
  AACR GENIE Results; APC_p.N627Lfs*2; B1501
TLTYRSQTL

SEQ ID NO: 21376 - protein, 10 aa, Homo sapiens
  AACR GENIE Results; APC_p.N627Lfs*2; B0801
GTLTYRSQTL

SEQ ID NO: 21377 - protein, 9 aa, Homo sapiens
  AACR GENIE Results; APC_p.N627Lfs*2; A0201
TLTYRSQTL

SEQ ID NO: 21378 - protein, 10 aa, Homo sapiens
  AACR GENIE Results; APC_p.N627Lfs*2; B5701
GTLTYRSQTL

SEQ ID NO: 21379 - protein, 8 aa, Homo sapiens
  AACR GENIE Results; APC_p.N627Lfs*2; B1501
LTYRSQTL

SEQ ID NO: 21380 - protein, 9 aa, Homo sapiens
  AACR GENIE Results; APC_p.N741Ifs*20; A2301
KYKDAILCL

SEQ ID NO: 21381 - protein, 9 aa, Homo sapiens
  AACR GENIE Results; APC_p.N741Ifs*20; A2402
KYKDAILCL

SEQ ID NO: 21382 - protein, 9 aa, Homo sapiens
  AACR GENIE Results; APC_p.N741Ifs*20; C0702
KYKDAILCL

SEQ ID NO: 21383 - protein, 9 aa, Homo sapiens
  AACR GENIE Results; APC_p.N942Ffs*3; A2402
TYNFTKSEF

SEQ ID NO: 21384 - protein, 9 aa, Homo sapiens
  AACR GENIE Results; APC_p.N942Ffs*3; A2301
TYNFTKSEF

SEQ ID NO: 21385 - protein, 8 aa, Homo sapiens
  AACR GENIE Results; APC_p.N942Ffs*3; B0801
YNFTKSEF

SEQ ID NO: 21386 - protein, 10 aa, Homo sapiens
  AACR GENIE Results; APC_p.N942Ffs*3; A2601
NTYNFTKSEF

SEQ ID NO: 21387 - protein, 9 aa, Homo sapiens
  AACR GENIE Results; APC_p.N942Ffs*3; A2902
TYNFTKSEF

SEQ ID NO: 21388 - protein, 9 aa, Homo sapiens
  AACR GENIE Results; APC_p.N942Ffs*3; C0702
TYNFTKSEF

SEQ ID NO: 21389 - protein, 9 aa, Homo sapiens
  AACR GENIE Results; APC_p.P1043Ffs*4; A3201
QLNSGRQSF

SEQ ID NO: 21390 - protein, 9 aa, Homo sapiens
  AACR GENIE Results; APC_p.P1043Ffs*4; B1501
QLNSGRQSF

SEQ ID NO: 21391 - protein, 11 aa, Homo sapiens
  AACR GENIE Results; APC_p.P1043Ffs*4; B4402
DEQLNSGRQSF

SEQ ID NO: 21392 - protein, 11 aa, Homo sapiens
  AACR GENIE Results; APC_p.P1043Ffs*4; B4403
DEQLNSGRQSF

SEQ ID NO: 21393 - protein, 11 aa, Homo sapiens
  AACR GENIE Results; APC_p.P1043Ffs*4; B1801
DEQLNSGRQSF

SEQ ID NO: 21394 - protein, 9 aa, Homo sapiens
  AACR GENIE Results; APC_p.P1043Ffs*4; B0702
QLNSGRQSF

SEQ ID NO: 21395 - protein, 11 aa, Homo sapiens
  AACR GENIE Results; APC_p.P1043Ffs*4; A2301
DEQLNSGRQSF

SEQ ID NO: 21396 - protein, 10 aa, Homo sapiens
  AACR GENIE Results; APC_p.P1043Ffs*4; B1501
EQLNSGRQSF

SEQ ID NO: 21397 - protein, 10 aa, Homo sapiens
  AACR GENIE Results; APC_p.P1043Ffs*4; B4403
EQLNSGRQSF

SEQ ID NO: 21398 - protein, 10 aa, Homo sapiens
  AACR GENIE Results; APC_p.P1043Ffs*4; B3801
EQLNSGRQSF

SEQ ID NO: 21399 - protein, 10 aa, Homo sapiens
  AACR GENIE Results; APC_p.P1043Ffs*4; B4402
EQLNSGRQSF

SEQ ID NO: 21400 - protein, 9 aa, Homo sapiens
  AACR GENIE Results; APC_p.P1424Qfs*49; B1501
KQLKPSEKY

SEQ ID NO: 21401 - protein, 9 aa, Homo sapiens
  AACR GENIE Results; APC_p.P1424Qfs*49; A2301
KYLKIKHLL

SEQ ID NO: 21402 - protein, 10 aa, Homo sapiens
  AACR GENIE Results; APC_p.P1424Qfs*49; A2301
KYLKIKHLLL

SEQ ID NO: 21403 - protein, 9 aa, Homo sapiens
  AACR GENIE Results; APC_p.P1424Qfs*49; B4403
AEVKHLHHL

SEQ ID NO: 21404 - protein, 9 aa, Homo sapiens
  AACR GENIE Results; APC_p.P1424Qfs*49; B0702
KPSEKYLKI

SEQ ID NO: 21405 - protein, 9 aa, Homo sapiens
  AACR GENIE Results; APC_p.P1424Qfs*49; B3501
SPSDLQIAL

SEQ ID NO: 21406 - protein, 9 aa, Homo sapiens
  AACR GENIE Results; APC_p.P1424Qfs*49; B0702
SPSDLQIAL

SEQ ID NO: 21407 - protein, 9 aa, Homo sapiens
  AACR GENIE Results; APC_p.P1427Lfs*46; B1501
KQLKPSEKY

SEQ ID NO: 21408 - protein, 9 aa, Homo sapiens
  AACR GENIE Results; APC_p.P1427Lfs*46; A2301
KYLKIKHLL

SEQ ID NO: 21409 - protein, 10 aa, Homo sapiens
  AACR GENIE Results; APC_p.P1427Lfs*46; A2301
KYLKIKHLLL

SEQ ID NO: 21410 - protein, 9 aa, Homo sapiens
  AACR GENIE Results; APC_p.P1427Lfs*46; B4403
AEVKHLHHL

SEQ ID NO: 21411 - protein, 9 aa, Homo sapiens
  AACR GENIE Results; APC_p.P1427Lfs*46; B0702
KPSEKYLKI

SEQ ID NO: 21412 - protein, 9 aa, Homo sapiens
  AACR GENIE Results; APC_p.P1432Cfs*42; B1501
KQLKPSEKY

SEQ ID NO: 21413 - protein, 9 aa, Homo sapiens
  AACR GENIE Results; APC_p.P1432Cfs*42; A2301
KYLKIKHLL

SEQ ID NO: 21414 - protein, 9 aa, Homo sapiens
  AACR GENIE Results; APC_p.P1432Cfs*42; B4403
AEVKHLHHL

SEQ ID NO: 21415 - protein, 9 aa, Homo sapiens
  AACR GENIE Results; APC_p.P1432Cfs*42; B4002
AEVKHLHHL

SEQ ID NO: 21416 - protein, 10 aa, Homo sapiens
  AACR GENIE Results; APC_p.P1432Cfs*42; A2301
KYLKIKHLLL

SEQ ID NO: 21417 - protein, 8 aa, Homo sapiens
  AACR GENIE Results; APC_p.P1432Cfs*42; B1501
HQAEVKHL

SEQ ID NO: 21418 - protein, 9 aa, Homo sapiens
  AACR GENIE Results; APC_p.P1432Cfs*42; B0702
KPSEKYLKI

SEQ ID NO: 21419 - protein, 9 aa, Homo sapiens
  AACR GENIE Results; APC_p.P1432Cfs*42; A3002
KQLKPSEKY

SEQ ID NO: 21420 - protein, 9 aa, Homo sapiens
  AACR GENIE Results; APC_p.P1439Hfs*35; B1501
KQLKPSEKY

SEQ ID NO: 21421 - protein, 9 aa, Homo sapiens
  AACR GENIE Results; APC_p.P1439Hfs*35; B0702
KPSEKYLKI

SEQ ID NO: 21422 - protein, 9 aa, Homo sapiens
  AACR GENIE Results; APC_p.P1439Lfs*34; B1501
KQLKPSEKY

SEQ ID NO: 21423 - protein, 9 aa, Homo sapiens
  AACR GENIE Results; APC_p.P1439Lfs*34; A2301
KYLKIKHLL

SEQ ID NO: 21424 - protein, 10 aa, Homo sapiens
  AACR GENIE Results; APC_p.P1439Lfs*34; A2301
KYLKIKHLLL

SEQ ID NO: 21425 - protein, 9 aa, Homo sapiens
  AACR GENIE Results; APC_p.P1439Lfs*34; B5701
RSKTLHHLL

SEQ ID NO: 21426 - protein, 9 aa, Homo sapiens
  AACR GENIE Results; APC_p.P1439Lfs*34; B0702
KPSEKYLKI

SEQ ID NO: 21427 - protein, 9 aa, Homo sapiens
  AACR GENIE Results; APC_p.P1440Hfs*33; B1501
KQLKPSEKY

SEQ ID NO: 21428 - protein, 9 aa, Homo sapiens
  AACR GENIE Results; APC_p.P1440Hfs*33; A2301
KYLKIKHLL

SEQ ID NO: 21429 - protein, 10 aa, Homo sapiens
  AACR GENIE Results; APC_p.P1440Hfs*33; A2301
KYLKIKHLLL

SEQ ID NO: 21430 - protein, 9 aa, Homo sapiens
  AACR GENIE Results; APC_p.P1440Hfs*33; B0702
KPSEKYLKI

SEQ ID NO: 21431 - protein, 9 aa, Homo sapiens
  AACR GENIE Results; APC_p.P1443Lfs*30; A2301
KYLKIKHLL

SEQ ID NO: 21432 - protein, 9 aa, Homo sapiens
  AACR GENIE Results; APC_p.P1443Lfs*30; B1501
KQLKPSEKY

SEQ ID NO: 21433 - protein, 10 aa, Homo sapiens
  AACR GENIE Results; APC_p.P1443Lfs*30; A2301
KYLKIKHLLL

SEQ ID NO: 21434 - protein, 9 aa, Homo sapiens
  AACR GENIE Results; APC_p.P1443Lfs*30; B0702
KPSEKYLKI

SEQ ID NO: 21435 - protein, 9 aa, Homo sapiens
  AACR GENIE Results; APC_p.P1497Qfs*10; B4001
TESTQMDFL

SEQ ID NO: 21436 - protein, 10 aa, Homo sapiens
  AACR GENIE Results; APC_p.P1497Qfs*10; B5001
TQMDFLVHPA

SEQ ID NO: 21437 - protein, 10 aa, Homo sapiens
  AACR GENIE Results; APC_p.P1497Qfs*10; A0205
TQMDFLVHPA

SEQ ID NO: 21438 - protein, 8 aa, Homo sapiens
  AACR GENIE Results; APC_p.P1497Qfs*10; B3701
TESTQMDF

SEQ ID NO: 21439 - protein, 8 aa, Homo sapiens
  AACR GENIE Results; APC_p.P1497Qfs*10; B3701
MDFLVHPA

SEQ ID NO: 21440 - protein, 9 aa, Homo sapiens
  AACR GENIE Results; APC_p.P1497Qfs*10; A0201
QMDFLVHPA

SEQ ID NO: 21441 - protein, 10 aa, Homo sapiens
  AACR GENIE Results; APC_p.P1497Qfs*10; A3001
TQMDFLVHPA

SEQ ID NO: 21442 - protein, 10 aa, Homo sapiens
  AACR GENIE Results; APC_p.P1497Qfs*10; A0201
TQMDFLVHPA

SEQ ID NO: 21443 - protein, 8 aa, Homo sapiens
  AACR GENIE Results; APC_p.P1497Qfs*10; B1801
TESTQMDF

SEQ ID NO: 21444 - protein, 9 aa, Homo sapiens
  AACR GENIE Results; APC_p.P1497Qfs*10; A6802
ESTQMDFLV

SEQ ID NO: 21445 - protein, 8 aa, Homo sapiens
  AACR GENIE Results; APC_p.P1497Qfs*10; B3503
FATESTQM

SEQ ID NO: 21446 - protein, 8 aa, Homo sapiens
  AACR GENIE Results; APC_p.P1497Qfs*10; B4002
MDFLVHPA

SEQ ID NO: 21447 - protein, 9 aa, Homo sapiens
  AACR GENIE Results; APC_p.P1497Qfs*10; B4901
TESTQMDFL

SEQ ID NO: 21448 - protein, 8 aa, Homo sapiens
  AACR GENIE Results; APC_p.P1497Qfs*10; B3501
FATESTQM

SEQ ID NO: 21449 - protein, 9 aa, Homo sapiens
  AACR GENIE Results; APC_p.P1497Qfs*10; A1101
STQMDFLVH

SEQ ID NO: 21450 - protein, 9 aa, Homo sapiens
  AACR GENIE Results; APC_p.P1497Qfs*10; B4002
TESTQMDFL

SEQ ID NO: 21451 - protein, 8 aa, Homo sapiens
  AACR GENIE Results; APC_p.P1497Qfs*10; C0304
FATESTQM

SEQ ID NO: 21452 - protein, 9 aa, Homo sapiens
  AACR GENIE Results; APC_p.P1497Qfs*10; C1402
HFATESTQM

SEQ ID NO: 21453 - protein, 8 aa, Homo sapiens
  AACR GENIE Results; APC_p.P1497Qfs*10; C1601
FATESTQM

SEQ ID NO: 21454 - protein, 10 aa, Homo sapiens
  AACR GENIE Results; APC_p.P1497Qfs*10; A6802
TQMDFLVHPA

SEQ ID NO: 21455 - protein, 10 aa, Homo sapiens
  AACR GENIE Results; APC_p.P1497Qfs*10; B3801
LHFATESTQM

SEQ ID NO: 21456 - protein, 9 aa, Homo sapiens
  AACR GENIE Results; APC_p.P1497Qfs*10; B5801
ATESTQMDF

SEQ ID NO: 21457 - protein, 9 aa, Homo sapiens
  AACR GENIE Results; APC_p.P1497Qfs*10; B5001
QMDFLVHPA

SEQ ID NO: 21458 - protein, 9 aa, Homo sapiens
  AACR GENIE Results; APC_p.P1497Qfs*10; A0205
QMDFLVHPA

SEQ ID NO: 21459 - protein, 8 aa, Homo sapiens
  AACR GENIE Results; APC_p.P1497Qfs*10; B1801
MDFLVHPA

SEQ ID NO: 21460 - protein, 9 aa, Homo sapiens
  AACR GENIE Results; APC_p.P1497Qfs*10; A3001
TESTQMDFL

SEQ ID NO: 21461 - protein, 8 aa, Homo sapiens
  AACR GENIE Results; APC_p.P1497Qfs*10; C0303
FATESTQM

SEQ ID NO: 21462 - protein, 8 aa, Homo sapiens
  AACR GENIE Results; APC_p.P1497Qfs*10; B3502
FATESTQM

SEQ ID NO: 21463 - protein, 9 aa, Homo sapiens
  AACR GENIE Results; APC_p.P1497Qfs*10; A6802
QMDFLVHPA

SEQ ID NO: 21464 - protein, 10 aa, Homo sapiens
  AACR GENIE Results; APC_p.P1497Qfs*10; B2702
FATESTQMDF

SEQ ID NO: 21465 - protein, 9 aa, Homo sapiens
  AACR GENIE Results; APC_p.P1497Qfs*10; B5001
TQMDFLVHP

SEQ ID NO: 21466 - protein, 10 aa, Homo sapiens
  AACR GENIE Results; APC_p.P1497Qfs*10; A3101
TQMDFLVHPA

SEQ ID NO: 21467 - protein, 8 aa, Homo sapiens
  AACR GENIE Results; APC_p.P1497Qfs*10; B5001
MDFLVHPA

SEQ ID NO: 21468 - protein, 10 aa, Homo sapiens
  AACR GENIE Results; APC_p.Q1294Gfs*6; B1501
GCNQTTGSRF

SEQ ID NO: 21469 - protein, 9 aa, Homo sapiens
  AACR GENIE Results; APC_p.Q1303Kfs*2; A6801
EADSANTLK

SEQ ID NO: 21470 - protein, 9 aa, Homo sapiens
  AACR GENIE Results; APC_p.Q1303Kfs*2; A1101
EADSANTLK

SEQ ID NO: 21471 - protein, 8 aa, Homo sapiens
  AACR GENIE Results; APC_p.Q1303Kfs*2; A1101
ADSANTLK

SEQ ID NO: 21472 - protein, 11 aa, Homo sapiens
  AACR GENIE Results; APC_p.Q1303Kfs*2; A1101
TQEADSANTLK

SEQ ID NO: 21473 - protein, 9 aa, Homo sapiens
  AACR GENIE Results; APC_p.Q1429Kfs*44; B1501
KQLKPSEKY

SEQ ID NO: 21474 - protein, 9 aa, Homo sapiens
  AACR GENIE Results; APC_p.Q1429Kfs*44; A2301
KYLKIKHLL

SEQ ID NO: 21475 - protein, 10 aa, Homo sapiens
  AACR GENIE Results; APC_p.Q1429Kfs*44; A2301
KYLKIKHLLL

SEQ ID NO: 21476 - protein, 9 aa, Homo sapiens
  AACR GENIE Results; APC_p.Q1429Kfs*44; B4403
AEVKHLHHL

SEQ ID NO: 21477 - protein, 9 aa, Homo sapiens
  AACR GENIE Results; APC_p.Q1429Kfs*44; B0702
KPSEKYLKI

SEQ ID NO: 21478 - protein, 10 aa, Homo sapiens
  AACR GENIE Results; APC_p.Q541Tfs*19; B4403
SESEDLTAGY

SEQ ID NO: 21479 - protein, 9 aa, Homo sapiens
  AACR GENIE Results; APC_p.Q541Tfs*19; A0101
ESEDLTAGY

SEQ ID NO: 21480 - protein, 8 aa, Homo sapiens
  AACR GENIE Results; APC_p.Q541Tfs*19; B1801
SEDLTAGY

SEQ ID NO: 21481 - protein, 10 aa, Homo sapiens
  AACR GENIE Results; APC_p.Q541Tfs*19; B4402
SESEDLTAGY

SEQ ID NO: 21482 - protein, 9 aa, Homo sapiens
  AACR GENIE Results; APC_p.Q541Tfs*19; B1801
EEFVLASRC

SEQ ID NO: 21483 - protein, 10 aa, Homo sapiens
  AACR GENIE Results; APC_p.Q541Tfs*19; B1801
SESEDLTAGY

SEQ ID NO: 21484 - protein, 9 aa, Homo sapiens
  AACR GENIE Results; APC_p.Q541Tfs*19; A2601
ESEDLTAGY

SEQ ID NO: 21485 - protein, 8 aa, Homo sapiens
  AACR GENIE Results; APC_p.Q541Tfs*19; B1801
EEFVLASR

SEQ ID NO: 21486 - protein, 8 aa, Homo sapiens
  AACR GENIE Results; APC_p.Q541Tfs*19; B4402
SEDLTAGY

SEQ ID NO: 21487 - protein, 8 aa, Homo sapiens
  AACR GENIE Results; APC_p.Q541Tfs*19; B4403
SEDLTAGY

SEQ ID NO: 21488 - protein, 11 aa, Homo sapiens
  AACR GENIE Results; APC_p.Q541Tfs*19; A0101
KSESEDLTAGY

SEQ ID NO: 21489 - protein, 9 aa, Homo sapiens
  AACR GENIE Results; APC_p.R1314Gfs*7; A2601
EIKEKIGTG

SEQ ID NO: 21490 - protein, 9 aa, Homo sapiens
  AACR GENIE Results; APC_p.R1314Gfs*7; B4001
KEKIGTGQL

SEQ ID NO: 21491 - protein, 9 aa, Homo sapiens
  AACR GENIE Results; APC_p.R1314Gfs*7; B0702
KEKIGTGQL

SEQ ID NO: 21492 - protein, 8 aa, Homo sapiens
  AACR GENIE Results; APC_p.R1314Gfs*7; A0301
KIGTGQLK

SEQ ID NO: 21493 - protein, 10 aa, Homo sapiens
  AACR GENIE Results; APC_p.R1399Ffs*9; A6802
DSFESFDCQL

SEQ ID NO: 21494 - protein, 9 aa, Homo sapiens
  AACR GENIE Results; APC_p.R1399Ffs*9; B5801
SSLDSFESF

SEQ ID NO: 21495 - protein, 8 aa, Homo sapiens
  AACR GENIE Results; APC_p.R1399Ffs*9; A3303
ESFDCQLR

SEQ ID NO: 21496 - protein, 10 aa, Homo sapiens
  AACR GENIE Results; APC_p.R1399Ffs*9; A6801
DSFESFDCQL

SEQ ID NO: 21497 - protein, 9 aa, Homo sapiens
  AACR GENIE Results; APC_p.R1399Ffs*9; B1501
SSLDSFESF

SEQ ID NO: 21498 - protein, 11 aa, Homo sapiens
  AACR GENIE Results; APC_p.R1399Ffs*9; A6801
DSFESFDCQLR

SEQ ID NO: 21499 - protein, 8 aa, Homo sapiens
  AACR GENIE Results; APC_p.R1399Ffs*9; B4001
FESFDCQL

SEQ ID NO: 21500 - protein, 9 aa, Homo sapiens
  AACR GENIE Results; APC_p.R2714C; B5101
NGSVPMCTV

SEQ ID NO: 21501 - protein, 9 aa, Homo sapiens
  AACR GENIE Results; APC_p.R640W; B4403
IESGGGILW

SEQ ID NO: 21502 - protein, 9 aa, Homo sapiens
  AACR GENIE Results; APC_p.R640W; B4402
IESGGGILW

SEQ ID NO: 21503 - protein, 11 aa, Homo sapiens
  AACR GENIE Results; APC_p.R640W; B5701
AIIESGGGILW

SEQ ID NO: 21504 - protein, 10 aa, Homo sapiens
  AACR GENIE Results; APC_p.R640W; B5701
IIESGGGILW

SEQ ID NO: 21505 - protein, 9 aa, Homo sapiens
  AACR GENIE Results; APC_p.R640W; A2301
IESGGGILW

SEQ ID NO: 21506 - protein, 11 aa, Homo sapiens
  AACR GENIE Results; APC_p.R653K; A1101
ATNEDHKQILR

SEQ ID NO: 21507 - protein, 11 aa, Homo sapiens
  AACR GENIE Results; APC_p.R653K; A3101
ATNEDHKQILR

SEQ ID NO: 21508 - protein, 9 aa, Homo sapiens
  AACR GENIE Results; APC_p.S1298Lfs*7; A6801
EADLLIPCK

SEQ ID NO: 21509 - protein, 8 aa, Homo sapiens
  AACR GENIE Results; APC_p.S1355Ffs*19; B4403
SEISLQKW

SEQ ID NO: 21510 - protein, 8 aa, Homo sapiens
  AACR GENIE Results; APC_p.S1355Ffs*19; B4402
SEISLQKW

SEQ ID NO: 21511 - protein, 9 aa, Homo sapiens
  AACR GENIE Results; APC_p.S1355Ffs*19; B5701
RSEISLQKW

SEQ ID NO: 21512 - protein, 9 aa, Homo sapiens
  AACR GENIE Results; APC_p.S1355Ffs*19; B2705
FRSEISLQK

SEQ ID NO: 21513 - protein, 8 aa, Homo sapiens
  AACR GENIE Results; APC_p.S1355Ffs*19; A2301
SEISLQKW

SEQ ID NO: 21514 - protein, 8 aa, Homo sapiens
  AACR GENIE Results; APC_p.S1355Ffs*19; B4901
VEFFRSEI

SEQ ID NO: 21515 - protein, 9 aa, Homo sapiens
  AACR GENIE Results; APC_p.S1355Lfs*60; A0201
CLADVLLSV

SEQ ID NO: 21516 - protein, 11 aa, Homo sapiens
  AACR GENIE Results; APC_p.S1355Lfs*60; B5701
APFRVNHAVEW

SEQ ID NO: 21517 - protein, 9 aa, Homo sapiens
  AACR GENIE Results; APC_p.S1355Lfs*60; B5101
DVLLSVHLI

SEQ ID NO: 21518 - protein, 9 aa, Homo sapiens
  AACR GENIE Results; APC_p.S1355Lfs*60; B4901
QERNLPPKV

SEQ ID NO: 21519 - protein, 9 aa, Homo sapiens
  AACR GENIE Results; APC_p.S1355Lfs*60; B1302
CLADVLLSV

SEQ ID NO: 21520 - protein, 9 aa, Homo sapiens
  AACR GENIE Results; APC_p.S1355Lfs*60; A3001
QERNLPPKV

SEQ ID NO: 21521 - protein, 9 aa, Homo sapiens
  AACR GENIE Results; APC_p.S1355Lfs*60; A3101
VVRLPAPFR

SEQ ID NO: 21522 - protein, 9 aa, Homo sapiens
  AACR GENIE Results; APC_p.S1355Lfs*60; C1502
SVHLIVLRV

SEQ ID NO: 21523 - protein, 9 aa, Homo sapiens
  AACR GENIE Results; APC_p.S1355Lfs*60; C0602
FRVNHAVEW

SEQ ID NO: 21524 - protein, 8 aa, Homo sapiens
  AACR GENIE Results; APC_p.S1355Lfs*60; B5701
RVNHAVEW

SEQ ID NO: 21525 - protein, 9 aa, Homo sapiens
  AACR GENIE Results; APC_p.S1355Lfs*60; C0602
VRLPAPFRV

SEQ ID NO: 21526 - protein, 9 aa, Homo sapiens
  AACR GENIE Results; APC_p.S1355Lfs*60; B0702
HPKVHLNTM

SEQ ID NO: 21527 - protein, 9 aa, Homo sapiens
  AACR GENIE Results; APC_p.S1355Lfs*60; B1302
SVHLIVLRV

SEQ ID NO: 21528 - protein, 9 aa, Homo sapiens
  AACR GENIE Results; APC_p.S1355Lfs*60; B5701
RVVRLPAPF

SEQ ID NO: 21529 - protein, 9 aa, Homo sapiens
  AACR GENIE Results; APC_p.S1355Lfs*60; B0801
HPKVHLNTM

SEQ ID NO: 21530 - protein, 8 aa, Homo sapiens
  AACR GENIE Results; APC_p.S1355Lfs*60; B0801
NLPPKVVL

SEQ ID NO: 21531 - protein, 8 aa, Homo sapiens
  AACR GENIE Results; APC_p.S1355Lfs*60; A3101
SVHLIVLR

SEQ ID NO: 21532 - protein, 10 aa, Homo sapiens
  AACR GENIE Results; APC_p.S1355Lfs*60; A3101
RNLPPKVVLR

SEQ ID NO: 21533 - protein, 9 aa, Homo sapiens
  AACR GENIE Results; APC_p.S1355Lfs*60; C0702
FRVNHAVEW

SEQ ID NO: 21534 - protein, 9 aa, Homo sapiens
  AACR GENIE Results; APC_p.S1355Lfs*60; B4001
VEFLQERNL

SEQ ID NO: 21535 - protein, 9 aa, Homo sapiens
  AACR GENIE Results; APC_p.S1355Lfs*60; A0301
VVRLPAPFR

SEQ ID NO: 21536 - protein, 8 aa, Homo sapiens
  AACR GENIE Results; APC_p.S1355Lfs*60; A3303
SVHLIVLR

SEQ ID NO: 21537 - protein, 9 aa, Homo sapiens
  AACR GENIE Results; APC_p.S1355Lfs*60; B2705
FRVNHAVEW

SEQ ID NO: 21538 - protein, 8 aa, Homo sapiens
  AACR GENIE Results; APC_p.S1355Lfs*60; B5501
APFRVNHA

SEQ ID NO: 21539 - protein, 9 aa, Homo sapiens
  AACR GENIE Results; APC_p.S1355Lfs*60; A0201
FLQERNLPP

SEQ ID NO: 21540 - protein, 9 aa, Homo sapiens
  AACR GENIE Results; APC_p.S1411Rfs*4; B5701
VQSEPCREW

SEQ ID NO: 21541 - protein, 10 aa, Homo sapiens
  AACR GENIE Results; APC_p.S1411Rfs*4; B5701
SVQSEPCREW

SEQ ID NO: 21542 - protein, 11 aa, Homo sapiens
  AACR GENIE Results; APC_p.S1411Rfs*4; B5701
SSVQSEPCREW

SEQ ID NO: 21543 - protein, 9 aa, Homo sapiens
  AACR GENIE Results; APC_p.S1411Rfs*4; B5801
VQSEPCREW

SEQ ID NO: 21544 - protein, 9 aa, Homo sapiens
  AACR GENIE Results; APC_p.S1411Rfs*4; B1501
VQSEPCREW

SEQ ID NO: 21545 - protein, 9 aa, Homo sapiens
  AACR GENIE Results; APC_p.S1411Rfs*4; B4403
VQSEPCREW

SEQ ID NO: 21546 - protein, 9 aa, Homo sapiens
  AACR GENIE Results; APC_p.S1411Rfs*4; A3001
VQSEPCREW

SEQ ID NO: 21547 - protein, 8 aa, Homo sapiens
  AACR GENIE Results; APC_p.S1411Rfs*4; B5701
QSEPCREW

SEQ ID NO: 21548 - protein, 11 aa, Homo sapiens
  AACR GENIE Results; APC_p.S1411Rfs*4; A6801
IASSVQSEPCR

SEQ ID NO: 21549 - protein, 10 aa, Homo sapiens
  AACR GENIE Results; APC_p.S1415Kfs*8; B4403
SEPCSGMVKW

SEQ ID NO: 21550 - protein, 11 aa, Homo sapiens
  AACR GENIE Results; APC_p.S1415Rfs*4; B4002
SEPCSGMVRAL

SEQ ID NO: 21551 - protein, 8 aa, Homo sapiens
  AACR GENIE Results; APC_p.S1415Rfs*4; C1601
CSGMVRAL

SEQ ID NO: 21552 - protein, 9 aa, Homo sapiens
  AACR GENIE Results; APC_p.S1421Vfs*52; A6802
IISPVIFQI

SEQ ID NO: 21553 - protein, 9 aa, Homo sapiens
  AACR GENIE Results; APC_p.S1421Vfs*52; B1302
IISPVIFQI

SEQ ID NO: 21554 - protein, 9 aa, Homo sapiens
  AACR GENIE Results; APC_p.S1421Vfs*52; A0201
IISPVIFQI

SEQ ID NO: 21555 - protein, 9 aa, Homo sapiens
  AACR GENIE Results; APC_p.S1421Vfs*52; C1502
IISPVIFQI

SEQ ID NO: 21556 - protein, 9 aa, Homo sapiens
  AACR GENIE Results; APC_p.S1421Vfs*52; B1501
KQLKPSEKY

SEQ ID NO: 21557 - protein, 9 aa, Homo sapiens
  AACR GENIE Results; APC_p.S1421Vfs*52; C1701
IISPVIFQI

SEQ ID NO: 21558 - protein, 9 aa, Homo sapiens
  AACR GENIE Results; APC_p.S1421Vfs*52; B5701
IISPVIFQI

SEQ ID NO: 21559 - protein, 9 aa, Homo sapiens
  AACR GENIE Results; APC_p.S1421Vfs*52; C0704
IISPVIFQI

SEQ ID NO: 21560 - protein, 9 aa, Homo sapiens
  AACR GENIE Results; APC_p.S1421Vfs*52; A2301
KYLKIKHLL

SEQ ID NO: 21561 - protein, 9 aa, Homo sapiens
  AACR GENIE Results; APC_p.S1421Vfs*52; B3503
SPVIFQIAL

SEQ ID NO: 21562 - protein, 9 aa, Homo sapiens
  AACR GENIE Results; APC_p.S1421Vfs*52; C0202
IISPVIFQI

SEQ ID NO: 21563 - protein, 10 aa, Homo sapiens
  AACR GENIE Results; APC_p.S1421Vfs*52; A2301
KYLKIKHLLL

SEQ ID NO: 21564 - protein, 9 aa, Homo sapiens
  AACR GENIE Results; APC_p.S1421Vfs*52; B4403
AEVKHLHHL

SEQ ID NO: 21565 - protein, 9 aa, Homo sapiens
  AACR GENIE Results; APC_p.S1421Vfs*52; B0702
KPSEKYLKI

SEQ ID NO: 21566 - protein, 9 aa, Homo sapiens
  AACR GENIE Results; APC_p.S1421Vfs*52; C1203
IISPVIFQI

SEQ ID NO: 21567 - protein, 9 aa, Homo sapiens
  AACR GENIE Results; APC_p.S1421Vfs*52; B3503
IISPVIFQI

SEQ ID NO: 21568 - protein, 9 aa, Homo sapiens
  AACR GENIE Results; APC_p.S1421Vfs*52; C0303
IISPVIFQI

SEQ ID NO: 21569 - protein, 9 aa, Homo sapiens
  AACR GENIE Results; APC_p.S1421Vfs*52; B4002
AEVKHLHHL

SEQ ID NO: 21570 - protein, 9 aa, Homo sapiens
  AACR GENIE Results; APC_p.S1421Vfs*52; B0702
SPVIFQIAL

SEQ ID NO: 21571 - protein, 9 aa, Homo sapiens
  AACR GENIE Results; APC_p.S1421Vfs*52; A3001
IISPVIFQI

SEQ ID NO: 21572 - protein, 9 aa, Homo sapiens
  AACR GENIE Results; APC_p.S1421Vfs*52; B3501
SPVIFQIAL

SEQ ID NO: 21573 - protein, 9 aa, Homo sapiens
  AACR GENIE Results; APC_p.S1436Vfs*37; B1501
KQLKPSEKY

SEQ ID NO: 21574 - protein, 9 aa, Homo sapiens
  AACR GENIE Results; APC_p.S1436Vfs*37; A2301
KYLKIKHLL

SEQ ID NO: 21575 - protein, 10 aa, Homo sapiens
  AACR GENIE Results; APC_p.S1436Vfs*37; A2301
KYLKIKHLLL

SEQ ID NO: 21576 - protein, 9 aa, Homo sapiens
  AACR GENIE Results; APC_p.S1436Vfs*37; B0702
KPSEKYLKI

SEQ ID NO: 21577 - protein, 9 aa, Homo sapiens
  AACR GENIE Results; APC_p.S1495Kfs*19; C1502
YSRWIFLFI

SEQ ID NO: 21578 - protein, 9 aa, Homo sapiens
  AACR GENIE Results; APC_p.S1495Kfs*19; A3101
IQPECSEPR

SEQ ID NO: 21579 - protein, 9 aa, Homo sapiens
  AACR GENIE Results; APC_p.S1495Kfs*19; A2301
KYSRWIFLF

SEQ ID NO: 21580 - protein, 9 aa, Homo sapiens
  AACR GENIE Results; APC_p.S1495Kfs*19; A6801
IQPECSEPR

SEQ ID NO: 21581 - protein, 9 aa, Homo sapiens
  AACR GENIE Results; APC_p.S1495Kfs*19; A1101
IQPECSEPR

SEQ ID NO: 21582 - protein, 9 aa, Homo sapiens
  AACR GENIE Results; APC_p.S1495Kfs*19; B1501
LLHFATEKY

SEQ ID NO: 21583 - protein, 9 aa, Homo sapiens
  AACR GENIE Results; APC_p.S1495Vfs*12; A0201
QMDFLVHPA

SEQ ID NO: 21584 - protein, 8 aa, Homo sapiens
  AACR GENIE Results; APC_p.S1495Vfs*12; B1801
TEVLQMDF

SEQ ID NO: 21585 - protein, 9 aa, Homo sapiens
  AACR GENIE Results; APC_p.S1495Vfs*12; A0201
TLLHFATEV

SEQ ID NO: 21586 - protein, 9 aa, Homo sapiens
  AACR GENIE Results; APC_p.S1495Vfs*12; B4001
TEVLQMDFL

SEQ ID NO: 21587 - protein, 9 aa, Homo sapiens
  AACR GENIE Results; APC_p.S1495Vfs*12; A6802
QMDFLVHPA

SEQ ID NO: 21588 - protein, 8 aa, Homo sapiens
  AACR GENIE Results; APC_p.S1495Vfs*12; B4002
MDFLVHPA

SEQ ID NO: 21589 - protein, 9 aa, Homo sapiens
  AACR GENIE Results; APC_p.S1495Vfs*12; B1302
TLLHFATEV

SEQ ID NO: 21590 - protein, 9 aa, Homo sapiens
  AACR GENIE Results; APC_p.S1495Vfs*12; B4901
TEVLQMDFL

SEQ ID NO: 21591 - protein, 10 aa, Homo sapiens
  AACR GENIE Results; APC_p.S1495Vfs*12; A0201
LQMDFLVHPA

SEQ ID NO: 21592 - protein, 8 aa, Homo sapiens
  AACR GENIE Results; APC_p.S1495Vfs*12; B4002
TEVLQMDF

SEQ ID NO: 21593 - protein, 9 aa, Homo sapiens
  AACR GENIE Results; APC_p.S1495Vfs*12; B4002
TEVLQMDFL

SEQ ID NO: 21594 - protein, 9 aa, Homo sapiens
  AACR GENIE Results; APC_p.S1495Vfs*12; A6802
EVLQMDFLV

SEQ ID NO: 21595 - protein, 9 aa, Homo sapiens
  AACR GENIE Results; APC_p.S1495Vfs*12; C1402
HFATEVLQM

SEQ ID NO: 21596 - protein, 9 aa, Homo sapiens
  AACR GENIE Results; APC_p.S1495Vfs*12; A0101
ATEVLQMDF

SEQ ID NO: 21597 - protein, 8 aa, Homo sapiens
  AACR GENIE Results; APC_p.S1495Vfs*12; B1801
MDFLVHPA

SEQ ID NO: 21598 - protein, 9 aa, Homo sapiens
  AACR GENIE Results; APC_p.S1495Vfs*12; A3101
QMDFLVHPA

SEQ ID NO: 21599 - protein, 10 aa, Homo sapiens
  AACR GENIE Results; APC_p.S1495Vfs*12; B3501
FATEVLQMDF

SEQ ID NO: 21600 - protein, 8 aa, Homo sapiens
  AACR GENIE Results; APC_p.S1501Lfs*6; B1801
DGFLVHPA

SEQ ID NO: 21601 - protein, 11 aa, Homo sapiens
  AACR GENIE Results; APC_p.S1501Lfs*6; A0201
STPDGFLVHPA

SEQ ID NO: 21602 - protein, 9 aa, Homo sapiens
  AACR GENIE Results; APC_p.S1501Lfs*6; B4001
TESTPDGFL

SEQ ID NO: 21603 - protein, 10 aa, Homo sapiens
  AACR GENIE Results; APC_p.S1501Lfs*6; B5501
TPDGFLVHPA

SEQ ID NO: 21604 - protein, 9 aa, Homo sapiens
  AACR GENIE Results; APC_p.S1501Lfs*6; A1101
STPDGFLVH

SEQ ID NO: 21605 - protein, 10 aa, Homo sapiens
  AACR GENIE Results; APC_p.S1501Lfs*6; A6801
TPDGFLVHPA

SEQ ID NO: 21606 - protein, 8 aa, Homo sapiens
  AACR GENIE Results; APC_p.S1501Lfs*6; B5101
DGFLVHPA

SEQ ID NO: 21607 - protein, 9 aa, Homo sapiens
  AACR GENIE Results; APC_p.S1501Lfs*6; B4901
TESTPDGFL

SEQ ID NO: 21608 - protein, 9 aa, Homo sapiens
  AACR GENIE Results; APC_p.S1581Lfs*69; B1501
SQPRLLQNY

SEQ ID NO: 21609 - protein, 9 aa, Homo sapiens
  AACR GENIE Results; APC_p.S1581Lfs*69; B5101
LPCQQSHHV

SEQ ID NO: 21610 - protein, 9 aa, Homo sapiens
  AACR GENIE Results; APC_p.S1581Lfs*69; B0702
QPRLLQNYL

SEQ ID NO: 21611 - protein, 10 aa, Homo sapiens
  AACR GENIE Results; APC_p.S1581Lfs*69; B5701
RLLQNYLHLW

SEQ ID NO: 21612 - protein, 8 aa, Homo sapiens
  AACR GENIE Results; APC_p.S1581Lfs*69; B0801
NPKSMLVL

SEQ ID NO: 21613 - protein, 8 aa, Homo sapiens
  AACR GENIE Results; APC_p.S1581Lfs*69; B0702
NPKSMLVL

SEQ ID NO: 21614 - protein, 9 aa, Homo sapiens
  AACR GENIE Results; APC_p.S1581Lfs*69; A3101
HVKQKSQPR

SEQ ID NO: 21615 - protein, 10 aa, Homo sapiens
  AACR GENIE Results; APC_p.S1581Lfs*69; A0301
GCNPKSMLVL

SEQ ID NO: 21616 - protein, 10 aa, Homo sapiens
  AACR GENIE Results; APC_p.S1581Lfs*69; B5701
KSQPRLLQNY

SEQ ID NO: 21617 - protein, 10 aa, Homo sapiens
  AACR GENIE Results; APC_p.S1581Lfs*69; A0201
HLWQGNQVSC

SEQ ID NO: 21618 - protein, 9 aa, Homo sapiens
  AACR GENIE Results; APC_p.S299Cfs*27; B5701
GVFIVVNAW

SEQ ID NO: 21619 - protein, 9 aa, Homo sapiens
  AACR GENIE Results; APC_p.S299Cfs*27; B1302
NQGGNGVFI

SEQ ID NO: 21620 - protein, 9 aa, Homo sapiens
  AACR GENIE Results; APC_p.S299Cfs*27; B1302
GGNGVFIVV

SEQ ID NO: 21621 - protein, 9 aa, Homo sapiens
  AACR GENIE Results; APC_p.S299Cfs*27; B3801
NQGGNGVFI

SEQ ID NO: 21622 - protein, 8 aa, Homo sapiens
  AACR GENIE Results; APC_p.S299Cfs*27; A2301
VFIVVNAW

SEQ ID NO: 21623 - protein, 9 aa, Homo sapiens
  AACR GENIE Results; APC_p.S299Cfs*27; A2902
VFIVVNAWY

SEQ ID NO: 21624 - protein, 9 aa, Homo sapiens
  AACR GENIE Results; APC_p.S770Qfs*7; B3801
QHLQKLLTI

SEQ ID NO: 21625 - protein, 11 aa, Homo sapiens
  AACR GENIE Results; APC_p.S770Qfs*7; B4001
AELDAQHLQKL

SEQ ID NO: 21626 - protein, 11 aa, Homo sapiens
  AACR GENIE Results; APC_p.S770Qfs*7; B4403
AELDAQHLQKL

SEQ ID NO: 21627 - protein, 8 aa, Homo sapiens
  AACR GENIE Results; APC_p.S770Qfs*7; B5101
DAQHLQKL

SEQ ID NO: 21628 - protein, 9 aa, Homo sapiens
  AACR GENIE Results; APC_p.S770Qfs*7; B4403
AELDAQHLQ

SEQ ID NO: 21629 - protein, 9 aa, Homo sapiens
  AACR GENIE Results; APC_p.S770Qfs*7; B4402
AELDAQHLQ

SEQ ID NO: 21630 - protein, 11 aa, Homo sapiens
  AACR GENIE Results; APC_p.S770Qfs*7; B4402
AELDAQHLQKL

SEQ ID NO: 21631 - protein, 9 aa, Homo sapiens
  AACR GENIE Results; APC_p.S770Qfs*7; A2301
QHLQKLLTI

SEQ ID NO: 21632 - protein, 9 aa, Homo sapiens
  AACR GENIE Results; APC_p.S770Qfs*7; B0801
QHLQKLLTI

SEQ ID NO: 21633 - protein, 10 aa, Homo sapiens
  AACR GENIE Results; APC_p.S770Qfs*7; B4403
AELDAQHLQK

SEQ ID NO: 21634 - protein, 9 aa, Homo sapiens
  AACR GENIE Results; APC_p.T1023Nfs*6; B4001
GELDNTNKL

SEQ ID NO: 21635 - protein, 9 aa, Homo sapiens
  AACR GENIE Results; APC_p.T1023Nfs*6; B4403
GELDNTNKL

SEQ ID NO: 21636 - protein, 9 aa, Homo sapiens
  AACR GENIE Results; APC_p.T1023Nfs*6; B4402
GELDNTNKL

SEQ ID NO: 21637 - protein, 8 aa, Homo sapiens
  AACR GENIE Results; APC_p.T1023Nfs*6; C0802
ELDNTNKL

SEQ ID NO: 21638 - protein, 8 aa, Homo sapiens
  AACR GENIE Results; APC_p.T1023Nfs*6; C0501
ELDNTNKL

SEQ ID NO: 21639 - protein, 9 aa, Homo sapiens
  AACR GENIE Results; APC_p.T1023Nfs*6; B0702
GELDNTNKL

SEQ ID NO: 21640 - protein, 9 aa, Homo sapiens
  AACR GENIE Results; APC_p.T1023Nfs*6; A2301
GELDNTNKL

SEQ ID NO: 21641 - protein, 9 aa, Homo sapiens
  AACR GENIE Results; APC_p.T1023Nfs*6; B1501
GELDNTNKL

SEQ ID NO: 21642 - protein, 8 aa, Homo sapiens
  AACR GENIE Results; APC_p.T1023Nfs*6; C0401
ELDNTNKL

SEQ ID NO: 21643 - protein, 9 aa, Homo sapiens
  AACR GENIE Results; APC_p.T1023Nfs*6; B3801
GELDNTNKL

SEQ ID NO: 21644 - protein, 8 aa, Homo sapiens
  AACR GENIE Results; APC_p.T1023Nfs*6; A0101
ELDNTNKL

SEQ ID NO: 21645 - protein, 11 aa, Homo sapiens
  AACR GENIE Results; APC_p.T1301Sfs*10; A6801
TTQEADSANSR

SEQ ID NO: 21646 - protein, 11 aa, Homo sapiens
  AACR GENIE Results; APC_p.T1301Sfs*10; A3101
TTQEADSANSR

SEQ ID NO: 21647 - protein, 11 aa, Homo sapiens
  AACR GENIE Results; APC_p.T1301Sfs*10; A1101
TTQEADSANSR

SEQ ID NO: 21648 - protein, 9 aa, Homo sapiens
  AACR GENIE Results; APC_p.T1438Hfs*35; B1501
KQLKPSEKY

SEQ ID NO: 21649 - protein, 9 aa, Homo sapiens
  AACR GENIE Results; APC_p.T1438Hfs*35; A2301
KYLKIKHLL

SEQ ID NO: 21650 - protein, 10 aa, Homo sapiens
  AACR GENIE Results; APC_p.T1438Hfs*35; A2301
KYLKIKHLLL

SEQ ID NO: 21651 - protein, 9 aa, Homo sapiens
  AACR GENIE Results; APC_p.T1438Hfs*35; B0702
KPSEKYLKI

SEQ ID NO: 21652 - protein, 9 aa, Homo sapiens
  AACR GENIE Results; APC_p.T1445Qfs*28; B1501
QQLKPSEKY

SEQ ID NO: 21653 - protein, 9 aa, Homo sapiens
  AACR GENIE Results; APC_p.T1445Qfs*28; B0702
KPSEKYLKI

SEQ ID NO: 21654 - protein, 9 aa, Homo sapiens
  AACR GENIE Results; APC_p.T1487Ifs*25; C1502
YSRWIFLFI

SEQ ID NO: 21655 - protein, 9 aa, Homo sapiens
  AACR GENIE Results; APC_p.T1487Ifs*25; A2301
KYSRWIFLF

SEQ ID NO: 21656 - protein, 9 aa, Homo sapiens
  AACR GENIE Results; APC_p.T1487Ifs*25; A3101
IQPECSEPR

SEQ ID NO: 21657 - protein, 9 aa, Homo sapiens
  AACR GENIE Results; APC_p.T1487Ifs*25; A6801
IQPECSEPR

SEQ ID NO: 21658 - protein, 9 aa, Homo sapiens
  AACR GENIE Results; APC_p.T1487Ifs*25; A1101
IQPECSEPR

SEQ ID NO: 21659 - protein, 10 aa, Homo sapiens
  AACR GENIE Results; APC_p.T1487Nfs*27; B3501
LPDADNFITF

SEQ ID NO: 21660 - protein, 9 aa, Homo sapiens
  AACR GENIE Results; APC_p.T1487Nfs*27; C1502
YSRWIFLFI

SEQ ID NO: 21661 - protein, 9 aa, Homo sapiens
  AACR GENIE Results; APC_p.T1487Nfs*27; A2301
KYSRWIFLF

SEQ ID NO: 21662 - protein, 9 aa, Homo sapiens
  AACR GENIE Results; APC_p.T1487Nfs*27; A3101
IQPECSEPR

SEQ ID NO: 21663 - protein, 9 aa, Homo sapiens
  AACR GENIE Results; APC_p.T1487Nfs*27; A6801
IQPECSEPR

SEQ ID NO: 21664 - protein, 9 aa, Homo sapiens
  AACR GENIE Results; APC_p.T1487Nfs*27; A1101
IQPECSEPR

SEQ ID NO: 21665 - protein, 8 aa, Homo sapiens
  AACR GENIE Results; APC_p.T1487Nfs*27; B3501
DADNFITF

SEQ ID NO: 21666 - protein, 9 aa, Homo sapiens
  AACR GENIE Results; APC_p.T1487Yfs*18; A0201
QMDFLVHPA

SEQ ID NO: 21667 - protein, 8 aa, Homo sapiens
  AACR GENIE Results; APC_p.T1487Yfs*18; B1801
MDFLVHPA

SEQ ID NO: 21668 - protein, 8 aa, Homo sapiens
  AACR GENIE Results; APC_p.T1493Rfs*14; B3701
MDFLVHPA

SEQ ID NO: 21669 - protein, 9 aa, Homo sapiens
  AACR GENIE Results; APC_p.T1493Rfs*14; A0201
QMDFLVHPA

SEQ ID NO: 21670 - protein, 8 aa, Homo sapiens
  AACR GENIE Results; APC_p.T1493Rfs*14; B4002
MDFLVHPA

SEQ ID NO: 21671 - protein, 9 aa, Homo sapiens
  AACR GENIE Results; APC_p.T1493Rfs*14; A6802
QMDFLVHPA

SEQ ID NO: 21672 - protein, 8 aa, Homo sapiens
  AACR GENIE Results; APC_p.T1493Rfs*14; B1801
MDFLVHPA

SEQ ID NO: 21673 - protein, 9 aa, Homo sapiens
  AACR GENIE Results; APC_p.T1493Rfs*14; A3101
QMDFLVHPA

SEQ ID NO: 21674 - protein, 9 aa, Homo sapiens
  AACR GENIE Results; APC_p.T1556Lfs*9; A6801
EAEKLLILK

SEQ ID NO: 21675 - protein, 9 aa, Homo sapiens
  AACR GENIE Results; APC_p.T1556Lfs*9; B4001
KEAEKLLIL

SEQ ID NO: 21676 - protein, 9 aa, Homo sapiens
  AACR GENIE Results; APC_p.T1556Nfs*3; B4403
QEKEAEKNY

SEQ ID NO: 21677 - protein, 9 aa, Homo sapiens
  AACR GENIE Results; APC_p.T1556Nfs*3; B4402
QEKEAEKNY

SEQ ID NO: 21678 - protein, 9 aa, Homo sapiens
  AACR GENIE Results; APC_p.T1556Nfs*3; B4102
QEKEAEKNY

SEQ ID NO: 21679 - protein, 9 aa, Homo sapiens
  AACR GENIE Results; APC_p.T1556Nfs*3; B4405
QEKEAEKNY

SEQ ID NO: 21680 - protein, 9 aa, Homo sapiens
  AACR GENIE Results; APC_p.T1556Nfs*3; A2301
QEKEAEKNY

SEQ ID NO: 21681 - protein, 9 aa, Homo sapiens
  AACR GENIE Results; APC_p.V1452Yfs*21; A2301
EYLKIKHLL

SEQ ID NO: 21682 - protein, 9 aa, Homo sapiens
  AACR GENIE Results; APC_p.V1452Yfs*21; A2402
EYLKIKHLL

SEQ ID NO: 21683 - protein, 10 aa, Homo sapiens
  AACR GENIE Results; APC_p.V1452Yfs*21; A2301
EYLKIKHLLL

SEQ ID NO: 21684 - protein, 10 aa, Homo sapiens
  AACR GENIE Results; APC_p.V1452Yfs*21; A2402
EYLKIKHLLL

SEQ ID NO: 21685 - protein, 8 aa, Homo sapiens
  AACR GENIE Results; APC_p.Y935Ifs*19; B3901
THSNTISL

SEQ ID NO: 21686 - protein, 9 aa, Homo sapiens
  AACR GENIE Results; APC_p.Y935Ifs*19; A3303
HSNTISLSR

SEQ ID NO: 21687 - protein, 9 aa, Homo sapiens
  AACR GENIE Results; APC_p.Y935Ifs*19; A6801
HSNTISLSR

SEQ ID NO: 21688 - protein, 8 aa, Homo sapiens
  AACR GENIE Results; APC_p.Y935Ifs*19; B3801
THSNTISL

SEQ ID NO: 21689 - protein, 9 aa, Homo sapiens
  AACR GENIE Results; APC_p.Y935Ifs*19; A3301
HSNTISLSR

SEQ ID NO: 21690 - protein, 9 aa, Homo sapiens
  AACR GENIE Results; APC_p.Y935Ifs*19; B1302
IQIGHVLCL

SEQ ID NO: 21691 - protein, 9 aa, Homo sapiens
  AACR GENIE Results; APC_p.Y935Ifs*19; A3101
HSNTISLSR

SEQ ID NO: 21692 - protein, 9 aa, Homo sapiens
  AACR GENIE Results; APC_p.Y935Ifs*19; C0304
HTHSNTISL

SEQ ID NO: 21693 - protein, 9 aa, Homo sapiens
  AACR GENIE Results; APC_p.Y935Ifs*19; A3001
HTHSNTISL

SEQ ID NO: 21694 - protein, 9 aa, Homo sapiens
  AACR GENIE Results; APC_p.Y935Ifs*19; B1501
IQIGHVLCL

SEQ ID NO: 21695 - protein, 9 aa, Homo sapiens
  AACR GENIE Results; APC_p.Y935Ifs*19; A6802
HTHSNTISL

SEQ ID NO: 21696 - protein, 9 aa, Homo sapiens
  AACR GENIE Results; APC_p.Y935Ifs*19; B4002
HTHSNTISL

SEQ ID NO: 21697 - protein, 9 aa, Homo sapiens
  AACR GENIE Results; APC_p.Y935Ifs*19; B3503
HTHSNTISL

SEQ ID NO: 21698 - protein, 11 aa, Homo sapiens
  AACR GENIE Results; APC_p.Y935Ifs*19; A3303
HTHSNTISLSR

SEQ ID NO: 21699 - protein, 11 aa, Homo sapiens
  AACR GENIE Results; APC_p.Y935Ifs*19; A6801
HTHSNTISLSR

SEQ ID NO: 21700 - protein, 9 aa, Homo sapiens
  AACR GENIE Results; AR_p.A597T; A3101
KQKYLCTSR

SEQ ID NO: 21701 - protein, 9 aa, Homo sapiens
  AACR GENIE Results; AR_p.F814V; B5801
VSIIPVDGL

SEQ ID NO: 21702 - protein, 10 aa, Homo sapiens
  AACR GENIE Results; AR_p.F814V; A6802
LVSIIPVDGL

SEQ ID NO: 21703 - protein, 9 aa, Homo sapiens
  AACR GENIE Results; AR_p.F814V; C0304
VSIIPVDGL

SEQ ID NO: 21704 - protein, 9 aa, Homo sapiens
  AACR GENIE Results; AR_p.F814V; B1501
VSIIPVDGL

SEQ ID NO: 21705 - protein, 9 aa, Homo sapiens
  AACR GENIE Results; AR_p.F814V; B4001
VSIIPVDGL

SEQ ID NO: 21706 - protein, 9 aa, Homo sapiens
  AACR GENIE Results; AR_p.F814V; C0303
VSIIPVDGL

SEQ ID NO: 21707 - protein, 9 aa, Homo sapiens
  AACR GENIE Results; AR_p.F814V; A0201
LLLVSIIPV

SEQ ID NO: 21708 - protein, 9 aa, Homo sapiens
  AACR GENIE Results; AR_p.R609M; A1101
CTIDKFRMK

SEQ ID NO: 21709 - protein, 9 aa, Homo sapiens
  AACR GENIE Results; AR_p.R609M; A0301
CTIDKFRMK

SEQ ID NO: 21710 - protein, 9 aa, Homo sapiens
  AACR GENIE Results; ARAF_p.F101C; B5101
VPLTMHNCV

SEQ ID NO: 21711 - protein, 9 aa, Homo sapiens
  AACR GENIE Results; ARID1A_p.A167dup; B1501
AAAAAAAVF

SEQ ID NO: 21712 - protein, 9 aa, Homo sapiens
  AACR GENIE Results; ARID1A_p.A167dup; B3501
AAAAAAAVF

SEQ ID NO: 21713 - protein, 9 aa, Homo sapiens
  AACR GENIE Results; ARID1A_p.A167dup; C0303
AAAAAAAVF

SEQ ID NO: 21714 - protein, 11 aa, Homo sapiens
  AACR GENIE Results; ARID1A_p.A167dup; B1501
AVAAAAAAAVF

SEQ ID NO: 21715 - protein, 9 aa, Homo sapiens
  AACR GENIE Results; ARID1A_p.A167dup; C0304
AAAAAAAVF

SEQ ID NO: 21716 - protein, 9 aa, Homo sapiens
  AACR GENIE Results; ARID1A_p.A167dup; C0202
AAAAAAAVF

SEQ ID NO: 21717 - protein, 9 aa, Homo sapiens
  AACR GENIE Results; ARID1A_p.A167dup; C1203
AAAAAAAVF

SEQ ID NO: 21718 - protein, 9 aa, Homo sapiens
  AACR GENIE Results; ARID1A_p.A167dup; B0702
AAAAAAAVF

SEQ ID NO: 21719 - protein, 9 aa, Homo sapiens
  AACR GENIE Results; ARID1A_p.A167dup; B5101
VAAAAAAAV

SEQ ID NO: 21720 - protein, 9 aa, Homo sapiens
  AACR GENIE Results; ARID1A_p.A167dup; C1601
AAAAAAAVF

SEQ ID NO: 21721 - protein, 10 aa, Homo sapiens
  AACR GENIE Results; ARID1A_p.A167dup; B3501
VAAAAAAAVF

SEQ ID NO: 21722 - protein, 10 aa, Homo sapiens
  AACR GENIE Results; ARID1A_p.A167dup; B1501
VAAAAAAAVF

SEQ ID NO: 21723 - protein, 11 aa, Homo sapiens
  AACR GENIE Results; ARID1A_p.A167dup; B3501
AVAAAAAAAVF

SEQ ID NO: 21724 - protein, 10 aa, Homo sapiens
  AACR GENIE Results; ARID1A_p.A167dup; C0303
VAAAAAAAVF

SEQ ID NO: 21725 - protein, 9 aa, Homo sapiens
  AACR GENIE Results; ARID1A_p.A167dup; A3201
AAAAAAAVF

SEQ ID NO: 21726 - protein, 11 aa, Homo sapiens
  AACR GENIE Results; ARID1A_p.A45dup; A6801
EAAAAAAAAER

SEQ ID NO: 21727 - protein, 10 aa, Homo sapiens
  AACR GENIE Results; ARID1A_p.A45dup; A6801
AAAAAAAAER

SEQ ID NO: 21728 - protein, 9 aa, Homo sapiens
  AACR GENIE Results; ARID1A_p.E2250Rfs*28; A2601
ELIGFTSHL

SEQ ID NO: 21729 - protein, 9 aa, Homo sapiens
  AACR GENIE Results; ARID1A_p.E2250Rfs*28; B1801
DELIGFTSH

SEQ ID NO: 21730 - protein, 8 aa, Homo sapiens
  AACR GENIE Results; ARID1A_p.E2250Rfs*28; B1801
DENHSRVY

SEQ ID NO: 21731 - protein, 9 aa, Homo sapiens
  AACR GENIE Results; ARID1A_p.E2250Rfs*28; A0201
ELIGFTSHL

SEQ ID NO: 21732 - protein, 9 aa, Homo sapiens
  AACR GENIE Results; ARID1A_p.E2250Rfs*28; B0801
ELIGFTSHL

SEQ ID NO: 21733 - protein, 9 aa, Homo sapiens
  AACR GENIE Results; ARID1A_p.E2250Rfs*28; C0102
ELIGFTSHL

SEQ ID NO: 21734 - protein, 10 aa, Homo sapiens
  AACR GENIE Results; ARID1A_p.E2250Rfs*28; B3801
GHLGITVDEL

SEQ ID NO: 21735 - protein, 9 aa, Homo sapiens
  AACR GENIE Results; ARID1A_p.E2250Rfs*28; A6801
ELIGFTSHL

SEQ ID NO: 21736 - protein, 9 aa, Homo sapiens
  AACR GENIE Results; ARID1A_p.E2250Rfs*28; B1501
ELIGFTSHL

SEQ ID NO: 21737 - protein, 9 aa, Homo sapiens
  AACR GENIE Results; ARID1A_p.E2250Rfs*28; B0801
ENHSRVYSV

SEQ ID NO: 21738 - protein, 9 aa, Homo sapiens
  AACR GENIE Results; ARID1A_p.E2250Rfs*28; B1302
ELIGFTSHL

SEQ ID NO: 21739 - protein, 9 aa, Homo sapiens
  AACR GENIE Results; ARID1A_p.E2250Rfs*28; B5701
ITVDELIGF

SEQ ID NO: 21740 - protein, 9 aa, Homo sapiens
  AACR GENIE Results; ARID1A_p.E2250Rfs*28; A2301
ELIGFTSHL

SEQ ID NO: 21741 - protein, 9 aa, Homo sapiens
  AACR GENIE Results; ARID1A_p.E2250Rfs*28; C1601
VYSVRITAV

SEQ ID NO: 21742 - protein, 9 aa, Homo sapiens
  AACR GENIE Results; ARID1A_p.E2250Rfs*28; B0801
VYSVRITAV

SEQ ID NO: 21743 - protein, 9 aa, Homo sapiens
  AACR GENIE Results; ARID1A_p.E2250Rfs*28; A2402
VYSVRITAV

SEQ ID NO: 21744 - protein, 8 aa, Homo sapiens
  AACR GENIE Results; ARID1A_p.E2250Rfs*28; B5101
TAVGHLGI

SEQ ID NO: 21745 - protein, 9 aa, Homo sapiens
  AACR GENIE Results; ARID1A_p.E2250Rfs*28; B3801
ELIGFTSHL

SEQ ID NO: 21746 - protein, 9 aa, Homo sapiens
  AACR GENIE Results; ARID1A_p.E2250Rfs*28; C0602
VRITAVGHL

SEQ ID NO: 21747 - protein, 10 aa, Homo sapiens
  AACR GENIE Results; ARID1A_p.E2250Rfs*28; A0301
SVRITAVGHL

SEQ ID NO: 21748 - protein, 8 aa, Homo sapiens
  AACR GENIE Results; ARID1A_p.E2250Rfs*28; B1801
DELIGFTS

SEQ ID NO: 21749 - protein, 9 aa, Homo sapiens
  AACR GENIE Results; ARID1A_p.E2250Rfs*28; B2705
VRITAVGHL

SEQ ID NO: 21750 - protein, 10 aa, Homo sapiens
  AACR GENIE Results; ARID1A_p.E2250Rfs*28; B0702
SVRITAVGHL

SEQ ID NO: 21751 - protein, 9 aa, Homo sapiens
  AACR GENIE Results; ARID1A_p.E2250Rfs*28; A2601
ITVDELIGF

SEQ ID NO: 21752 - protein, 8 aa, Homo sapiens
  AACR GENIE Results; ARID1A_p.E2250Rfs*28; B5101
VGHLGITV

SEQ ID NO: 21753 - protein, 8 aa, Homo sapiens
  AACR GENIE Results; ARID1A_p.E2250Rfs*28; C1203
YSVRITAV

SEQ ID NO: 21754 - protein, 8 aa, Homo sapiens
  AACR GENIE Results; ARID1A_p.E2250Rfs*28; B0801
LIGFTSHL

SEQ ID NO: 21755 - protein, 9 aa, Homo sapiens
  AACR GENIE Results; ARID1A_p.E2250Rfs*28; A2902
ELIGFTSHL

SEQ ID NO: 21756 - protein, 8 aa, Homo sapiens
  AACR GENIE Results; ARID1A_p.E2250Rfs*28; C1502
LIGFTSHL

SEQ ID NO: 21757 - protein, 9 aa, Homo sapiens
  AACR GENIE Results; ARID1A_p.E2250Rfs*28; A3001
ELIGFTSHL

SEQ ID NO: 21758 - protein, 9 aa, Homo sapiens
  AACR GENIE Results; ARID1A_p.E2250Rfs*28; A2301
VYSVRITAV

SEQ ID NO: 21759 - protein, 9 aa, Homo sapiens
  AACR GENIE Results; ARID1A_p.E2250Rfs*28; B4403
ELIGFTSHL

SEQ ID NO: 21760 - protein, 9 aa, Homo sapiens
  AACR GENIE Results; ARID1A_p.E2250Rfs*28; B1402
ENHSRVYSV

SEQ ID NO: 21761 - protein, 8 aa, Homo sapiens
  AACR GENIE Results; ARID1A_p.E2250Rfs*28; B1302
YSVRITAV

SEQ ID NO: 21762 - protein, 8 aa, Homo sapiens
  AACR GENIE Results; ARID1A_p.E2250Rfs*28; B5101
YSVRITAV

SEQ ID NO: 21763 - protein, 9 aa, Homo sapiens
  AACR GENIE Results; ARID1A_p.E2250Rfs*28; A3101
ELIGFTSHL

SEQ ID NO: 21764 - protein, 8 aa, Homo sapiens
  AACR GENIE Results; ARID1A_p.E2250Rfs*28; C0501
TVDELIGF

SEQ ID NO: 21765 - protein, 9 aa, Homo sapiens
  AACR GENIE Results; ARID1A_p.E2250Rfs*28; B1501
ITVDELIGF

SEQ ID NO: 21766 - protein, 9 aa, Homo sapiens
  AACR GENIE Results; ARID1A_p.E2250Rfs*28; A1101
ELIGFTSHL

SEQ ID NO: 21767 - protein, 10 aa, Homo sapiens
  AACR GENIE Results; ARID1A_p.E2250Rfs*28; B1801
DELIGFTSHL

SEQ ID NO: 21768 - protein, 9 aa, Homo sapiens
  AACR GENIE Results; ARID1A_p.E2250Rfs*28; B3501
ELIGFTSHL

SEQ ID NO: 21769 - protein, 8 aa, Homo sapiens
  AACR GENIE Results; ARID1A_p.E2250Rfs*28; B0801
YSVRITAV

SEQ ID NO: 21770 - protein, 8 aa, Homo sapiens
  AACR GENIE Results; ARID1A_p.E2250Rfs*28; C0304
LIGFTSHL

SEQ ID NO: 21771 - protein, 9 aa, Homo sapiens
  AACR GENIE Results; ARID1A_p.E2250Rfs*28; B1402
VRITAVGHL

SEQ ID NO: 21772 - protein, 9 aa, Homo sapiens
  AACR GENIE Results; ARID1A_p.E2250Rfs*28; C0304
ELIGFTSHL

SEQ ID NO: 21773 - protein, 10 aa, Homo sapiens
  AACR GENIE Results; ARID1A_p.M1215I; B0702
TPNPGYQPSI

SEQ ID NO: 21774 - protein, 10 aa, Homo sapiens
  AACR GENIE Results; ARID1A_p.M1215I; B3501
TPNPGYQPSI

SEQ ID NO: 21775 - protein, 9 aa, Homo sapiens
  AACR GENIE Results; ARID1A_p.M1215I; B3501
QPSINTSDM

SEQ ID NO: 21776 - protein, 9 aa, Homo sapiens
  AACR GENIE Results; ARID1A_p.M1215I; B0702
QPSINTSDM

SEQ ID NO: 21777 - protein, 9 aa, Homo sapiens
  AACR GENIE Results; ARID1A_p.M1361V; B3501
FPSQQTTVY

SEQ ID NO: 21778 - protein, 11 aa, Homo sapiens
  AACR GENIE Results; ARID1A_p.M1361V; B3501
SPFPSQQTTVY

SEQ ID NO: 21779 - protein, 11 aa, Homo sapiens
  AACR GENIE Results; ARID1A_p.M1361V; A0301
TVYQQQQQNYK

SEQ ID NO: 21780 - protein, 11 aa, Homo sapiens
  AACR GENIE Results; ARID1A_p.M1361V; A1101
TVYQQQQQNYK

SEQ ID NO: 21781 - protein, 10 aa, Homo sapiens
  AACR GENIE Results; ARID1A_p.M1361V; A2601
TVYQQQQQNY

SEQ ID NO: 21782 - protein, 9 aa, Homo sapiens
  AACR GENIE Results; ARID1A_p.M1361V; A2402
VYQQQQQNY

SEQ ID NO: 21783 - protein, 10 aa, Homo sapiens
  AACR GENIE Results; ARID1A_p.M1361V; B1501
TVYQQQQQNY

SEQ ID NO: 21784 - protein, 10 aa, Homo sapiens
  AACR GENIE Results; ARID1A_p.M1361V; B5101
SPFPSQQTTV

SEQ ID NO: 21785 - protein, 11 aa, Homo sapiens
  AACR GENIE Results; ARID1A_p.M1361V; B1501
SPFPSQQTTVY

SEQ ID NO: 21786 - protein, 10 aa, Homo sapiens
  AACR GENIE Results; ARID1A_p.M1361V; B3501
TVYQQQQQNY

SEQ ID NO: 21787 - protein, 10 aa, Homo sapiens
  AACR GENIE Results; ARID1A_p.M1361V; A0301
TVYQQQQQNY

SEQ ID NO: 21788 - protein, 10 aa, Homo sapiens
  AACR GENIE Results; ARID1A_p.M1361V; B0702
SPFPSQQTTV

SEQ ID NO: 21789 - protein, 8 aa, Homo sapiens
  AACR GENIE Results; ARID1A_p.M1361V; B5101
FPSQQTTV

SEQ ID NO: 21790 - protein, 9 aa, Homo sapiens
  AACR GENIE Results; ARID1A_p.M1361V; B1501
VYQQQQQNY

SEQ ID NO: 21791 - protein, 10 aa, Homo sapiens
  AACR GENIE Results; ARID1A_p.M1361V; A1101
TVYQQQQQNY

SEQ ID NO: 21792 - protein, 9 aa, Homo sapiens
  AACR GENIE Results; ARID1A_p.M1361V; B1501
FPSQQTTVY

SEQ ID NO: 21793 - protein, 8 aa, Homo sapiens
  AACR GENIE Results; ARID1A_p.M1361V; B1501
PSQQTTVY

SEQ ID NO: 21794 - protein, 10 aa, Homo sapiens
  AACR GENIE Results; ARID1A_p.M1361V; A1101
VYQQQQQNYK

SEQ ID NO: 21795 - protein, 11 aa, Homo sapiens
  AACR GENIE Results; ARID1A_p.M1361V; B0702
SPFPSQQTTVY

SEQ ID NO: 21796 - protein, 9 aa, Homo sapiens
  AACR GENIE Results; ARID1A_p.Q507Sfs*116; B5502
FPAALPSTA

SEQ ID NO: 21797 - protein, 8 aa, Homo sapiens
  AACR GENIE Results; ARID1A_p.Q507Sfs*116; B5101
DALPAGCV

SEQ ID NO: 21798 - protein, 11 aa, Homo sapiens
  AACR GENIE Results; ARID1A_p.Q507Sfs*116; B5502
LPAAIPASTSA

SEQ ID NO: 21799 - protein, 9 aa, Homo sapiens
  AACR GENIE Results; ARID1A_p.Q507Sfs*116; C0801
SAASTLDAL

SEQ ID NO: 21800 - protein, 9 aa, Homo sapiens
  AACR GENIE Results; ARID1A_p.Q507Sfs*116; B5502
LPAAATSAA

SEQ ID NO: 21801 - protein, 9 aa, Homo sapiens
  AACR GENIE Results; ARID1A_p.Q507Sfs*116; A2601
STAGAISRF

SEQ ID NO: 21802 - protein, 9 aa, Homo sapiens
  AACR GENIE Results; ARID1A_p.Q507Sfs*116; B3906
TGSVSLPAA

SEQ ID NO: 21803 - protein, 9 aa, Homo sapiens
  AACR GENIE Results; ARID1A_p.Q507Sfs*116; B5501
LPAAATSAA

SEQ ID NO: 21804 - protein, 9 aa, Homo sapiens
  AACR GENIE Results; ARID1A_p.Q507Sfs*116; B5501
FPAALPSTA

SEQ ID NO: 21805 - protein, 9 aa, Homo sapiens
  AACR GENIE Results; ARID1A_p.Q507Sfs*116; C0303
AATSAASTL

SEQ ID NO: 21806 - protein, 9 aa, Homo sapiens
  AACR GENIE Results; ARID1A_p.Q507Sfs*116; C0304
AATSAASTL

SEQ ID NO: 21807 - protein, 10 aa, Homo sapiens
  AACR GENIE Results; ARID1A_p.Q507Sfs*116; A6801
LPSTAGAISR

SEQ ID NO: 21808 - protein, 9 aa, Homo sapiens
  AACR GENIE Results; ARID1A_p.Q507Sfs*116; B3906
FPAALPSTA

SEQ ID NO: 21809 - protein, 9 aa, Homo sapiens
  AACR GENIE Results; ARID1A_p.Q507Sfs*116; B0702
APPEPAPLL

SEQ ID NO: 21810 - protein, 9 aa, Homo sapiens
  AACR GENIE Results; ARID1A_p.Q507Sfs*116; C0303
SSTTTAPVL

SEQ ID NO: 21811 - protein, 11 aa, Homo sapiens
  AACR GENIE Results; ARID1A_p.Q507Sfs*116; B5502
APPEPAPLLTA

SEQ ID NO: 21812 - protein, 11 aa, Homo sapiens
  AACR GENIE Results; ARID1A_p.Q507Sfs*116; B3503
TAAPPEPAPLL

SEQ ID NO: 21813 - protein, 9 aa, Homo sapiens
  AACR GENIE Results; ARID1A_p.Q507Sfs*116; B5502
VPGSIPLPA

SEQ ID NO: 21814 - protein, 9 aa, Homo sapiens
  AACR GENIE Results; ARID1A_p.Q507Sfs*116; C1701
GAISRFIWV

SEQ ID NO: 21815 - protein, 9 aa, Homo sapiens
  AACR GENIE Results; ARID1A_p.Q507Sfs*116; B3503
FPAALPSTA

SEQ ID NO: 21816 - protein, 9 aa, Homo sapiens
  AACR GENIE Results; ARID1A_p.Q507Sfs*116; B3503
SAASTLDAL

SEQ ID NO: 21817 - protein, 9 aa, Homo sapiens
  AACR GENIE Results; ARID1A_p.Q507Sfs*116; B5101
TAPVLSASI

SEQ ID NO: 21818 - protein, 10 aa, Homo sapiens
  AACR GENIE Results; ARID1A_p.Q507Sfs*116; B5502
VPGSIPLPAV

SEQ ID NO: 21819 - protein, 9 aa, Homo sapiens
  AACR GENIE Results; ARID1A_p.Q507Sfs*116; B0702
APVLSASIL

SEQ ID NO: 21820 - protein, 9 aa, Homo sapiens
  AACR GENIE Results; ARID1A_p.Q507Sfs*116; B3502
TAAPPEPAP

SEQ ID NO: 21821 - protein, 10 aa, Homo sapiens
  AACR GENIE Results; ARID1A_p.Q507Sfs*116; B5502
VPANCLFPAA

SEQ ID NO: 21822 - protein, 9 aa, Homo sapiens
  AACR GENIE Results; ARID1A_p.Q507Sfs*116; B5502
LPAAIPAST

SEQ ID NO: 21823 - protein, 9 aa, Homo sapiens
  AACR GENIE Results; ARID1A_p.Q507Sfs*116; B3503
APVLSASIL

SEQ ID NO: 21824 - protein, 9 aa, Homo sapiens
  AACR GENIE Results; ARID1A_p.Q507Sfs*116; C0102
AIPASTSAV

SEQ ID NO: 21825 - protein, 10 aa, Homo sapiens
  AACR GENIE Results; ARID1A_p.Q507Sfs*116; B2702
LPSTAGAISR

SEQ ID NO: 21826 - protein, 9 aa, Homo sapiens
  AACR GENIE Results; ARID1A_p.Q507Sfs*116; B3503
APPEPAPLL

SEQ ID NO: 21827 - protein, 9 aa, Homo sapiens
  AACR GENIE Results; ARID1A_p.Q507Sfs*116; B3502
APPEPAPLL

SEQ ID NO: 21828 - protein, 9 aa, Homo sapiens
  AACR GENIE Results; ARID1A_p.Q507Sfs*116; B5502
QPQSSTTTA

SEQ ID NO: 21829 - protein, 8 aa, Homo sapiens
  AACR GENIE Results; ARID1A_p.Q507Sfs*116; B5502
LPAAATSA

SEQ ID NO: 21830 - protein, 9 aa, Homo sapiens
  AACR GENIE Results; ARID1A_p.Q507Sfs*116; A0201
TLDALPAGC

SEQ ID NO: 21831 - protein, 9 aa, Homo sapiens
  AACR GENIE Results; ARID1A_p.Q507Sfs*116; B3503
TAAPPEPAP

SEQ ID NO: 21832 - protein, 10 aa, Homo sapiens
  AACR GENIE Results; ARID1A_p.Q507Sfs*116; B3503
TAAPPEPAPL

SEQ ID NO: 21833 - protein, 11 aa, Homo sapiens
  AACR GENIE Results; ARID1A_p.Q507Sfs*116; B5701
STAGAISRFIW

SEQ ID NO: 21834 - protein, 9 aa, Homo sapiens
  AACR GENIE Results; ARID1A_p.Q507Sfs*116; B3502
SAASTLDAL

SEQ ID NO: 21835 - protein, 9 aa, Homo sapiens
  AACR GENIE Results; ARID1A_p.Q507Sfs*116; A0205
SAASTLDAL

SEQ ID NO: 21836 - protein, 10 aa, Homo sapiens
  AACR GENIE Results; ARID1A_p.Q507Sfs*116; C0102
TAPVLSASIL

SEQ ID NO: 21837 - protein, 11 aa, Homo sapiens
  AACR GENIE Results; ARID1A_p.Q507Sfs*116; B3501
LPSTAGAISRF

SEQ ID NO: 21838 - protein, 9 aa, Homo sapiens
  AACR GENIE Results; ARID1A_p.Q507Sfs*116; B5502
TGSVSLPAA

SEQ ID NO: 21839 - protein, 9 aa, Homo sapiens
  AACR GENIE Results; ARID1A_p.Q507Sfs*116; B5801
SSTTTAPVL

SEQ ID NO: 21840 - protein, 9 aa, Homo sapiens
  AACR GENIE Results; ARID1A_p.Q507Sfs*116; B3503
SAVPGSIPL

SEQ ID NO: 21841 - protein, 9 aa, Homo sapiens
  AACR GENIE Results; ARID1A_p.Q507Sfs*116; C0102
TAPVLSASI

SEQ ID NO: 21842 - protein, 9 aa, Homo sapiens
  AACR GENIE Results; ARID1A_p.Q507Sfs*116; B5502
LPAGCVSSA

SEQ ID NO: 21843 - protein, 8 aa, Homo sapiens
  AACR GENIE Results; ARID1A_p.Q507Sfs*116; B3503
TATGSVSL

SEQ ID NO: 21844 - protein, 9 aa, Homo sapiens
  AACR GENIE Results; ARID1A_p.Q507Sfs*116; C0102
ALPSTAGAI

SEQ ID NO: 21845 - protein, 8 aa, Homo sapiens
  AACR GENIE Results; ARID1A_p.Q507Sfs*116; B5502
FPAALPST

SEQ ID NO: 21846 - protein, 8 aa, Homo sapiens
  AACR GENIE Results; ARID1A_p.Q507Sfs*116; B5101
IPASTSAV

SEQ ID NO: 21847 - protein, 9 aa, Homo sapiens
  AACR GENIE Results; ARID1A_p.Q507Sfs*116; B5501
QPQSSTTTA

SEQ ID NO: 21848 - protein, 9 aa, Homo sapiens
  AACR GENIE Results; ARID1A_p.Q507Sfs*116; C0304
SSTTTAPVL

SEQ ID NO: 21849 - protein, 11 aa, Homo sapiens
  AACR GENIE Results; ARID1A_p.Q507Sfs*116; B5502
IPLPAVDDTAA

SEQ ID NO: 21850 - protein, 10 aa, Homo sapiens
  AACR GENIE Results; ARID1A_p.Q507Sfs*116; A6802
TTAPVLSASI

SEQ ID NO: 21851 - protein, 11 aa, Homo sapiens
  AACR GENIE Results; ARID1A_p.Q507Sfs*116; B5502
APVLSASILPA

SEQ ID NO: 21852 - protein, 9 aa, Homo sapiens
  AACR GENIE Results; ARID1A_p.Q507Sfs*116; B3501
FPAALPSTA

SEQ ID NO: 21853 - protein, 9 aa, Homo sapiens
  AACR GENIE Results; ARID1A_p.Q507Sfs*116; B3906
GSVSLPAAA

SEQ ID NO: 21854 - protein, 9 aa, Homo sapiens
  AACR GENIE Results; ARID1A_p.Q507Sfs*116; B3901
SAASTLDAL

SEQ ID NO: 21855 - protein, 11 aa, Homo sapiens
  AACR GENIE Results; ARID1A_p.Q507Sfs*116; A0206
AVPGSIPLPAV

SEQ ID NO: 21856 - protein, 9 aa, Homo sapiens
  AACR GENIE Results; ARID1A_p.Q507Sfs*116; A6802
TTTAPVLSA

SEQ ID NO: 21857 - protein, 11 aa, Homo sapiens
  AACR GENIE Results; ARID1A_p.Q507Sfs*116; B5502
FPAALPSTAGA

SEQ ID NO: 21858 - protein, 9 aa, Homo sapiens
  AACR GENIE Results; ARID1A_p.Q507Sfs*116; B3501
APPEPAPLL

SEQ ID NO: 21859 - protein, 8 aa, Homo sapiens
  AACR GENIE Results; ARID1A_p.Q507Sfs*116; B5502
IPASTSAV

SEQ ID NO: 21860 - protein, 11 aa, Homo sapiens
  AACR GENIE Results; ARID1A_p.Q507Sfs*116; B0702
APVSAVPANCL

SEQ ID NO: 21861 - protein, 9 aa, Homo sapiens
  AACR GENIE Results; ARID1A_p.Q507Sfs*116; A1101
ATGSVSLPA

SEQ ID NO: 21862 - protein, 9 aa, Homo sapiens
  AACR GENIE Results; ARID1A_p.Q507Sfs*116; B3503
SSTTTAPVL

SEQ ID NO: 21863 - protein, 10 aa, Homo sapiens
  AACR GENIE Results; ARID1A_p.Q507Sfs*116; B5502
FPAALPSTAG

SEQ ID NO: 21864 - protein, 10 aa, Homo sapiens
  AACR GENIE Results; ARID1A_p.Q507Sfs*116; B3502
TAAPPEPAPL

SEQ ID NO: 21865 - protein, 9 aa, Homo sapiens
  AACR GENIE Results; ARID1A_p.Q507Sfs*116; B5502
APPEPAPLL

SEQ ID NO: 21866 - protein, 10 aa, Homo sapiens
  AACR GENIE Results; ARID1A_p.Q507Sfs*116; B3503
FPAALPSTAG

SEQ ID NO: 21867 - protein, 8 aa, Homo sapiens
  AACR GENIE Results; ARID1A_p.Q507Sfs*116; B5101
LPSTAGAI

SEQ ID NO: 21868 - protein, 9 aa, Homo sapiens
  AACR GENIE Results; ARID1A_p.Q507Sfs*116; B1302
ALPSTAGAI

SEQ ID NO: 21869 - protein, 8 aa, Homo sapiens
  AACR GENIE Results; ARID1A_p.Q507Sfs*116; B3906
FPAALPST

SEQ ID NO: 21870 - protein, 9 aa, Homo sapiens
  AACR GENIE Results; ARID1A_p.Q507Sfs*116; B5502
APVSAVPAN

SEQ ID NO: 21871 - protein, 9 aa, Homo sapiens
  AACR GENIE Results; ARID1A_p.Q507Sfs*116; B4601
AAIPASTSA

SEQ ID NO: 21872 - protein, 9 aa, Homo sapiens
  AACR GENIE Results; ARID1A_p.Q507Sfs*116; B5101
APPEPAPLL

SEQ ID NO: 21873 - protein, 9 aa, Homo sapiens
  AACR GENIE Results; ARID1A_p.Q507Sfs*116; C0304
SAVPGSIPL

SEQ ID NO: 21874 - protein, 10 aa, Homo sapiens
  AACR GENIE Results; ARID1A_p.Q507Sfs*116; B3501
FPAALPSTAG

SEQ ID NO: 21875 - protein, 9 aa, Homo sapiens
  AACR GENIE Results; ARID1A_p.Q507Sfs*116; B3503
LPAAATSAA

SEQ ID NO: 21876 - protein, 8 aa, Homo sapiens
  AACR GENIE Results; ARID1A_p.Q507Sfs*116; B5502
APVSAVPA

SEQ ID NO: 21877 - protein, 9 aa, Homo sapiens
  AACR GENIE Results; ARID1A_p.Q507Sfs*116; B5501
APVSAVPAN

SEQ ID NO: 21878 - protein, 9 aa, Homo sapiens
  AACR GENIE Results; ARID1A_p.Q507Sfs*116; C1601
SSTTTAPVL

SEQ ID NO: 21879 - protein, 9 aa, Homo sapiens
  AACR GENIE Results; ARID1A_p.Q507Sfs*116; C1502
VSSAPVSAV

SEQ ID NO: 21880 - protein, 11 aa, Homo sapiens
  AACR GENIE Results; ARID1A_p.Q507Sfs*116; B5501
APPEPAPLLTA

SEQ ID NO: 21881 - protein, 9 aa, Homo sapiens
  AACR GENIE Results; ARID1A_p.Q507Sfs*116; C0102
SAPVSAVPA

SEQ ID NO: 21882 - protein, 11 aa, Homo sapiens
  AACR GENIE Results; ARID1A_p.Q507Sfs*116; A6801
DTAAPPEPAPL

SEQ ID NO: 21883 - protein, 10 aa, Homo sapiens
  AACR GENIE Results; ARID1A_p.Q507Sfs*116; B2702
FPAALPSTAG

SEQ ID NO: 21884 - protein, 9 aa, Homo sapiens
  AACR GENIE Results; ARID1A_p.Q507Sfs*116; B3502
AAPPEPAPL

SEQ ID NO: 21885 - protein, 9 aa, Homo sapiens
  AACR GENIE Results; ARID1A_p.Q507Sfs*116; B5001
TTTAPVLSA

SEQ ID NO: 21886 - protein, 9 aa, Homo sapiens
  AACR GENIE Results; ARID1A_p.Q507Sfs*116; B5501
VPGSIPLPA

SEQ ID NO: 21887 - protein, 11 aa, Homo sapiens
  AACR GENIE Results; ARID1A_p.Q507Sfs*116; B3503
LPAAIPASTSA

SEQ ID NO: 21888 - protein, 9 aa, Homo sapiens
  AACR GENIE Results; ARID1A_p.Q507Sfs*116; C0102
AAPPEPAPL

SEQ ID NO: 21889 - protein, 8 aa, Homo sapiens
  AACR GENIE Results; ARID1A_p.Q507Sfs*116; C0304
STTTAPVL

SEQ ID NO: 21890 - protein, 9 aa, Homo sapiens
  AACR GENIE Results; ARID1A_p.Q507Sfs*116; B3501
TAAPPEPAP

SEQ ID NO: 21891 - protein, 9 aa, Homo sapiens
  AACR GENIE Results; ARID1A_p.Q507Sfs*116; B3906
VPGSIPLPA

SEQ ID NO: 21892 - protein, 8 aa, Homo sapiens
  AACR GENIE Results; ARID1A_p.Q507Sfs*116; B3502
TATGSVSL

SEQ ID NO: 21893 - protein, 9 aa, Homo sapiens
  AACR GENIE Results; ARID1A_p.Q507Sfs*116; B5502
TTTAPVLSA

SEQ ID NO: 21894 - protein, 9 aa, Homo sapiens
  AACR GENIE Results; ARID1A_p.Q507Sfs*116; B1501
STAGAISRF

SEQ ID NO: 21895 - protein, 9 aa, Homo sapiens
  AACR GENIE Results; ARID1A_p.Q507Sfs*116; B5801
STAGAISRF

SEQ ID NO: 21896 - protein, 9 aa, Homo sapiens
  AACR GENIE Results; ARID1A_p.Q507Sfs*116; B3501
SAASTLDAL

SEQ ID NO: 21897 - protein, 9 aa, Homo sapiens
  AACR GENIE Results; ARID1A_p.Q507Sfs*116; C0102
SLPAAATSA

SEQ ID NO: 21898 - protein, 9 aa, Homo sapiens
  AACR GENIE Results; ARID1A_p.Q507Sfs*116; A6801
PSTAGAISR

SEQ ID NO: 21899 - protein, 9 aa, Homo sapiens
  AACR GENIE Results; ARID1A_p.Q507Sfs*116; B3501
LPAAATSAA

SEQ ID NO: 21900 - protein, 11 aa, Homo sapiens
  AACR GENIE Results; ARID1A_p.Q507Sfs*116; B5502
SVSLPAAATSA

SEQ ID NO: 21901 - protein, 10 aa, Homo sapiens
  AACR GENIE Results; ARID1A_p.Q507Sfs*116; B5502
APVSAVPANC

SEQ ID NO: 21902 - protein, 9 aa, Homo sapiens
  AACR GENIE Results; ARID1A_p.Q507Sfs*116; B3501
LPAAIPAST

SEQ ID NO: 21903 - protein, 11 aa, Homo sapiens
  AACR GENIE Results; ARID1A_p.Q507Sfs*116; A0201
AVPGSIPLPAV

SEQ ID NO: 21904 - protein, 9 aa, Homo sapiens
  AACR GENIE Results; ARID1A_p.Q507Sfs*116; B3502
SAVPGSIPL

SEQ ID NO: 21905 - protein, 9 aa, Homo sapiens
  AACR GENIE Results; ARID1A_p.Q507Sfs*116; B5001
TGSVSLPAA

SEQ ID NO: 21906 - protein, 9 aa, Homo sapiens
  AACR GENIE Results; ARID1A_p.Q507Sfs*116; B3503
AATSAASTL

SEQ ID NO: 21907 - protein, 9 aa, Homo sapiens
  AACR GENIE Results; ARID1A_p.Q507Sfs*116; C1203
GAISRFIWV

SEQ ID NO: 21908 - protein, 9 aa, Homo sapiens
  AACR GENIE Results; ARID1A_p.Q507Sfs*116; B5101
FPAALPSTA

SEQ ID NO: 21909 - protein, 8 aa, Homo sapiens
  AACR GENIE Results; ARID1A_p.Q507Sfs*116; B3906
DALPAGCV

SEQ ID NO: 21910 - protein, 9 aa, Homo sapiens
  AACR GENIE Results; ARID1A_p.Q507Sfs*116; B1302
VSSAPVSAV

SEQ ID NO: 21911 - protein, 9 aa, Homo sapiens
  AACR GENIE Results; ARID1A_p.Q507Sfs*116; A0206
SAASTLDAL

SEQ ID NO: 21912 - protein, 8 aa, Homo sapiens
  AACR GENIE Results; ARID1A_p.Q507Sfs*116; C0303
STTTAPVL

SEQ ID NO: 21913 - protein, 10 aa, Homo sapiens
  AACR GENIE Results; ARID1A_p.Q507Sfs*116; B5502
IPLPAVDDTA

SEQ ID NO: 21914 - protein, 11 aa, Homo sapiens
  AACR GENIE Results; ARID1A_p.Q507Sfs*116; A6802
TAAPPEPAPLL

SEQ ID NO: 21915 - protein, 11 aa, Homo sapiens
  AACR GENIE Results; ARID1A_p.Q507Sfs*116; A6802
TTAPVLSASIL

SEQ ID NO: 21916 - protein, 8 aa, Homo sapiens
  AACR GENIE Results; ARID1A_p.Q507Sfs*116; B3906
SASILPAA

SEQ ID NO: 21917 - protein, 8 aa, Homo sapiens
  AACR GENIE Results; ARID1A_p.Q507Sfs*116; B5801
STTTAPVL

SEQ ID NO: 21918 - protein, 11 aa, Homo sapiens
  AACR GENIE Results; ARID1A_p.Q507Sfs*116; C1701
TAAPPEPAPLL

SEQ ID NO: 21919 - protein, 8 aa, Homo sapiens
  AACR GENIE Results; ARID1A_p.Q507Sfs*116; B3906
EPAPLLTA

SEQ ID NO: 21920 - protein, 9 aa, Homo sapiens
  AACR GENIE Results; ARID1A_p.Q507Sfs*116; A3001
TTTAPVLSA

SEQ ID NO: 21921 - protein, 9 aa, Homo sapiens
  AACR GENIE Results; ARID1A_p.Q507Sfs*116; B1501
AAIPASTSA

SEQ ID NO: 21922 - protein, 9 aa, Homo sapiens
  AACR GENIE Results; ARID1A_p.Q507Sfs*116; B5501
APPEPAPLL

SEQ ID NO: 21923 - protein, 9 aa, Homo sapiens
  AACR GENIE Results; ARID1A_p.Q507Sfs*116; A0206
GSVSLPAAA

SEQ ID NO: 21924 - protein, 11 aa, Homo sapiens
  AACR GENIE Results; ARID1A_p.Q507Sfs*116; B3906
LPAAIPASTSA

SEQ ID NO: 21925 - protein, 9 aa, Homo sapiens
  AACR GENIE Results; ARID1A_p.Q507Sfs*116; C0304
AAIPASTSA

SEQ ID NO: 21926 - protein, 8 aa, Homo sapiens
  AACR GENIE Results; ARID1A_p.Q507Sfs*116; B3906
GSVSLPAA

SEQ ID NO: 21927 - protein, 11 aa, Homo sapiens
  AACR GENIE Results; ARID1A_p.Q507Sfs*116; B3501
TAAPPEPAPLL

SEQ ID NO: 21928 - protein, 11 aa, Homo sapiens
  AACR GENIE Results; ARID1A_p.Q507Sfs*116; B5501
LPAAIPASTSA

SEQ ID NO: 21929 - protein, 8 aa, Homo sapiens
  AACR GENIE Results; ARID1A_p.Q507Sfs*116; B4002
STTTAPVL

SEQ ID NO: 21930 - protein, 9 aa, Homo sapiens
  AACR GENIE Results; ARID1A_p.Q507Sfs*116; A3303
TTTAPVLSA

SEQ ID NO: 21931 - protein, 9 aa, Homo sapiens
  AACR GENIE Results; ARID1A_p.Q507Sfs*116; B3503
LPAAIPAST

SEQ ID NO: 21932 - protein, 9 aa, Homo sapiens
  AACR GENIE Results; ARID1A_p.Q507Sfs*116; C1701
SAVPGSIPL

SEQ ID NO: 21933 - protein, 9 aa, Homo sapiens
  AACR GENIE Results; ARID1A_p.Q507Sfs*116; C0202
STAGAISRF

SEQ ID NO: 21934 - protein, 9 aa, Homo sapiens
  AACR GENIE Results; ARID1A_p.Q507Sfs*116; C1502
GAISRFIWV

SEQ ID NO: 21935 - protein, 9 aa, Homo sapiens
  AACR GENIE Results; ARID1A_p.Q507Sfs*116; C0801
AATSAASTL

SEQ ID NO: 21936 - protein, 10 aa, Homo sapiens
  AACR GENIE Results; ARID1A_p.Q507Sfs*116; B5502
LPAAIPASTS

SEQ ID NO: 21937 - protein, 9 aa, Homo sapiens
  AACR GENIE Results; ARID1A_p.Q507Sfs*116; B3906
TTTAPVLSA

SEQ ID NO: 21938 - protein, 9 aa, Homo sapiens
  AACR GENIE Results; ARID1A_p.Q507Sfs*116; C0801
VSSAPVSAV

SEQ ID NO: 21939 - protein, 9 aa, Homo sapiens
  AACR GENIE Results; ARID1A_p.Q507Sfs*116; B5501
TGSVSLPAA

SEQ ID NO: 21940 - protein, 9 aa, Homo sapiens
  AACR GENIE Results; ARID1A_p.Q507Sfs*116; B5801
VSSAPVSAV

SEQ ID NO: 21941 - protein, 9 aa, Homo sapiens
  AACR GENIE Results; ARID1A_p.Q507Sfs*116; A6802
VSSAPVSAV

SEQ ID NO: 21942 - protein, 9 aa, Homo sapiens
  AACR GENIE Results; ARID1A_p.Q507Sfs*116; A6801
STAGAISRF

SEQ ID NO: 21943 - protein, 10 aa, Homo sapiens
  AACR GENIE Results; ARID1A_p.Q507Sfs*116; A6802
STLDALPAGC

SEQ ID NO: 21944 - protein, 11 aa, Homo sapiens
  AACR GENIE Results; ARID1A_p.Q507Sfs*116; C0304
TAAPPEPAPLL

SEQ ID NO: 21945 - protein, 9 aa, Homo sapiens
  AACR GENIE Results; ARID1A_p.Q507Sfs*116; B3801
APPEPAPLL

SEQ ID NO: 21946 - protein, 8 aa, Homo sapiens
  AACR GENIE Results; ARID1A_p.Q507Sfs*116; B5501
FPAALPST

SEQ ID NO: 21947 - protein, 9 aa, Homo sapiens
  AACR GENIE Results; ARID1A_p.Q507Sfs*116; B5501
LPAGCVSSA

SEQ ID NO: 21948 - protein, 9 aa, Homo sapiens
  AACR GENIE Results; ARID1A_p.Q507Sfs*116; B3906
LPAAATSAA

SEQ ID NO: 21949 - protein, 8 aa, Homo sapiens
  AACR GENIE Results; ARID1A_p.Q507Sfs*116; B3503
PPEPAPLL

SEQ ID NO: 21950 - protein, 9 aa, Homo sapiens
  AACR GENIE Results; ARID1A_p.Q507Sfs*116; B5801
TTTAPVLSA

SEQ ID NO: 21951 - protein, 9 aa, Homo sapiens
  AACR GENIE Results; ARID1A_p.Q507Sfs*116; B5801
SAVPANCLF

SEQ ID NO: 21952 - protein, 11 aa, Homo sapiens
  AACR GENIE Results; ARID1A_p.Q507Sfs*116; A6802
STLDALPAGCV

SEQ ID NO: 21953 - protein, 9 aa, Homo sapiens
  AACR GENIE Results; ARID1A_p.Q507Sfs*116; C0304
SAASTLDAL

SEQ ID NO: 21954 - protein, 9 aa, Homo sapiens
  AACR GENIE Results; ARID1A_p.Q507Sfs*116; A0205
TGSVSLPAA

SEQ ID NO: 21955 - protein, 9 aa, Homo sapiens
  AACR GENIE Results; ARID1A_p.Q507Sfs*116; B5001
GSVSLPAAA

SEQ ID NO: 21956 - protein, 11 aa, Homo sapiens
  AACR GENIE Results; ARID1A_p.Q507Sfs*116; B3501
LPAAIPASTSA

SEQ ID NO: 21957 - protein, 9 aa, Homo sapiens
  AACR GENIE Results; ARID1A_p.Q507Sfs*116; C0801
SSTTTAPVL

SEQ ID NO: 21958 - protein, 10 aa, Homo sapiens
  AACR GENIE Results; ARID1A_p.Q507Sfs*116; B3901
TAAPPEPAPL

SEQ ID NO: 21959 - protein, 10 aa, Homo sapiens
  AACR GENIE Results; ARID1A_p.Q507Sfs*116; C0304
TAAPPEPAPL

SEQ ID NO: 21960 - protein, 9 aa, Homo sapiens
  AACR GENIE Results; ARID1A_p.Q507Sfs*116; B5001
PEPAPLLTA

SEQ ID NO: 21961 - protein, 10 aa, Homo sapiens
  AACR GENIE Results; ARID1A_p.Q507Sfs*116; A6802
TAAPPEPAPL

SEQ ID NO: 21962 - protein, 9 aa, Homo sapiens
  AACR GENIE Results; ARID1A_p.Q507Sfs*116; A0205
STAGAISRF

SEQ ID NO: 21963 - protein, 9 aa, Homo sapiens
  AACR GENIE Results; ARID1A_p.Q507Sfs*116; A6801
TTTAPVLSA

SEQ ID NO: 21964 - protein, 9 aa, Homo sapiens
  AACR GENIE Results; ARID1A_p.Q507Sfs*116; A0206
STLDALPAG

SEQ ID NO: 21965 - protein, 8 aa, Homo sapiens
  AACR GENIE Results; ARID1A_p.Q507Sfs*116; B5501
LPAAATSA

SEQ ID NO: 21966 - protein, 9 aa, Homo sapiens
  AACR GENIE Results; ARID1A_p.Q507Sfs*116; B5502
APVLSASIL

SEQ ID NO: 21967 - protein, 9 aa, Homo sapiens
  AACR GENIE Results; ARID1A_p.Q507Sfs*116; B4601
VSSAPVSAV

SEQ ID NO: 21968 - protein, 11 aa, Homo sapiens
  AACR GENIE Results; ARID1A_p.Q507Sfs*116; B3503
IPLPAVDDTAA

SEQ ID NO: 21969 - protein, 9 aa, Homo sapiens
  AACR GENIE Results; ARID1A_p.Q507Sfs*116; C1502
SSTTTAPVL

SEQ ID NO: 21970 - protein, 9 aa, Homo sapiens
  AACR GENIE Results; ARID1A_p.Q507Sfs*116; A3001
APPEPAPLL

SEQ ID NO: 21971 - protein, 9 aa, Homo sapiens
  AACR GENIE Results; ARID1A_p.Q507Sfs*116; C0303
SAASTLDAL

SEQ ID NO: 21972 - protein, 9 aa, Homo sapiens
  AACR GENIE Results; ARID1A_p.Q507Sfs*116; A3001
VSSAPVSAV

SEQ ID NO: 21973 - protein, 9 aa, Homo sapiens
  AACR GENIE Results; ARID1A_p.Q507Sfs*116; B3906
LPAAIPAST

SEQ ID NO: 21974 - protein, 9 aa, Homo sapiens
  AACR GENIE Results; ARID1A_p.Q507Sfs*116; A0205
AAIPASTSA

SEQ ID NO: 21975 - protein, 8 aa, Homo sapiens
  AACR GENIE Results; ARID1A_p.Q507Sfs*116; B5501
IPASTSAV

SEQ ID NO: 21976 - protein, 9 aa, Homo sapiens
  AACR GENIE Results; ARID1A_p.Q507Sfs*116; A0205
LTATGSVSL

SEQ ID NO: 21977 - protein, 9 aa, Homo sapiens
  AACR GENIE Results; ARID1A_p.Q507Sfs*116; B0702
LPAAATSAA

SEQ ID NO: 21978 - protein, 9 aa, Homo sapiens
  AACR GENIE Results; ARID1A_p.Q507Sfs*116; A1101
STAGAISRF

SEQ ID NO: 21979 - protein, 11 aa, Homo sapiens
  AACR GENIE Results; ARID1A_p.Q507Sfs*116; A6802
DTAAPPEPAPL

SEQ ID NO: 21980 - protein, 10 aa, Homo sapiens
  AACR GENIE Results; ARID1A_p.Q507Sfs*116; B3503
IPLPAVDDTA

SEQ ID NO: 21981 - protein, 8 aa, Homo sapiens
  AACR GENIE Results; ARID1A_p.Q507Sfs*116; C1601
STTTAPVL

SEQ ID NO: 21982 - protein, 10 aa, Homo sapiens
  AACR GENIE Results; ARID1A_p.Q507Sfs*116; A6802
STAGAISRFI

SEQ ID NO: 21983 - protein, 9 aa, Homo sapiens
  AACR GENIE Results; ARID1A_p.Q507Sfs*116; A0206
SSTTTAPVL

SEQ ID NO: 21984 - protein, 9 aa, Homo sapiens
  AACR GENIE Results; ARID1A_p.Q507Sfs*116; C0801
SAVPGSIPL

SEQ ID NO: 21985 - protein, 9 aa, Homo sapiens
  AACR GENIE Results; ARID1A_p.Q507Sfs*116; C0303
SAVPGSIPL

SEQ ID NO: 21986 - protein, 9 aa, Homo sapiens
  AACR GENIE Results; ARID1A_p.Q507Sfs*116; A6802
WVSGILSPL

SEQ ID NO: 21987 - protein, 9 aa, Homo sapiens
  AACR GENIE Results; ARID1A_p.Q507Sfs*116; B5801
VSAVPANCL

SEQ ID NO: 21988 - protein, 9 aa, Homo sapiens
  AACR GENIE Results; ARID1A_p.Q507Sfs*116; B5501
TTTAPVLSA

SEQ ID NO: 21989 - protein, 9 aa, Homo sapiens
  AACR GENIE Results; ARID1A_p.Q507Sfs*116; B1501
AATSAASTL

SEQ ID NO: 21990 - protein, 10 aa, Homo sapiens
  AACR GENIE Results; ARID1A_p.Q507Sfs*116; B3501
LPSTAGAISR

SEQ ID NO: 21991 - protein, 8 aa, Homo sapiens
  AACR GENIE Results; ARID1A_p.Q507Sfs*116; B3503
STTTAPVL

SEQ ID NO: 21992 - protein, 9 aa, Homo sapiens
  AACR GENIE Results; ARID1A_p.Q507Sfs*116; A0301
ATGSVSLPA

SEQ ID NO: 21993 - protein, 9 aa, Homo sapiens
  AACR GENIE Results; ARID1A_p.Q507Sfs*116; A0206
AVPGSIPLP

SEQ ID NO: 21994 - protein, 9 aa, Homo sapiens
  AACR GENIE Results; ARID1A_p.Q507Sfs*116; B5701
STAGAISRF

SEQ ID NO: 21995 - protein, 11 aa, Homo sapiens
  AACR GENIE Results; ARID1A_p.Q507Sfs*116; B3801
TAAPPEPAPLL

SEQ ID NO: 21996 - protein, 8 aa, Homo sapiens
  AACR GENIE Results; ARID1A_p.Q507Sfs*116; B3901
DALPAGCV

SEQ ID NO: 21997 - protein, 10 aa, Homo sapiens
  AACR GENIE Results; ARID1A_p.Q507Sfs*116; B3501
TAAPPEPAPL

SEQ ID NO: 21998 - protein, 10 aa, Homo sapiens
  AACR GENIE Results; ARID1A_p.Q507Sfs*116; A1101
ATGSVSLPAA

SEQ ID NO: 21999 - protein, 11 aa, Homo sapiens
  AACR GENIE Results; ARID1A_p.Q507Sfs*116; A6801
TTAPVLSASIL

SEQ ID NO: 22000 - protein, 9 aa, Homo sapiens
  AACR GENIE Results; ARID1A_p.Q507Sfs*116; C0602
SRFIWVSGI

SEQ ID NO: 22001 - protein, 9 aa, Homo sapiens
  AACR GENIE Results; ARID1A_p.Q507Sfs*116; A0201
ILPAAIPAS

SEQ ID NO: 22002 - protein, 8 aa, Homo sapiens
  AACR GENIE Results; ARID1A_p.Q507Sfs*116; B5801
TAGAISRF

SEQ ID NO: 22003 - protein, 10 aa, Homo sapiens
  AACR GENIE Results; ARID1A_p.Q507Sfs*116; A0206
STLDALPAGC

SEQ ID NO: 22004 - protein, 8 aa, Homo sapiens
  AACR GENIE Results; ARID1A_p.Q507Sfs*116; B5501
EPAPLLTA

SEQ ID NO: 22005 - protein, 9 aa, Homo sapiens
  AACR GENIE Results; ARID1A_p.Q507Sfs*116; A6802
SASILPAAI

SEQ ID NO: 22006 - protein, 8 aa, Homo sapiens
  AACR GENIE Results; ARID1A_p.Q507Sfs*116; B3501
TATGSVSL

SEQ ID NO: 22007 - protein, 9 aa, Homo sapiens
  AACR GENIE Results; ARID1A_p.Q507Sfs*116; B5502
IPASTSAVP

SEQ ID NO: 22008 - protein, 9 aa, Homo sapiens
  AACR GENIE Results; ARID1A_p.Q507Sfs*116; A6802
FPAALPSTA

SEQ ID NO: 22009 - protein, 10 aa, Homo sapiens
  AACR GENIE Results; ARID1A_p.Q507Sfs*116; A0201
ALPAGCVSSA

SEQ ID NO: 22010 - protein, 9 aa, Homo sapiens
  AACR GENIE Results; ARID1A_p.Q507Sfs*116; C0302
VSSAPVSAV

SEQ ID NO: 22011 - protein, 8 aa, Homo sapiens
  AACR GENIE Results; ARID1A_p.Q507Sfs*116; C0801
AASTLDAL

SEQ ID NO: 22012 - protein, 8 aa, Homo sapiens
  AACR GENIE Results; ARID1A_p.Q507Sfs*116; B5501
APVSAVPA

SEQ ID NO: 22013 - protein, 8 aa, Homo sapiens
  AACR GENIE Results; ARID1A_p.Q507Sfs*116; B3906
LPAAATSA

SEQ ID NO: 22014 - protein, 8 aa, Homo sapiens
  AACR GENIE Results; ARID1A_p.Q507Sfs*116; B0801
DALPAGCV

SEQ ID NO: 22015 - protein, 9 aa, Homo sapiens
  AACR GENIE Results; ARID1A_p.Q507Sfs*116; A6802
STSAVPGSI

SEQ ID NO: 22016 - protein, 11 aa, Homo sapiens
  AACR GENIE Results; ARID1A_p.Q507Sfs*116; B3503
APVSAVPANCL

SEQ ID NO: 22017 - protein, 8 aa, Homo sapiens
  AACR GENIE Results; ARID1A_p.Q507Sfs*116; B3501
FPAALPST

SEQ ID NO: 22018 - protein, 9 aa, Homo sapiens
  AACR GENIE Results; ARID1A_p.Q507Sfs*116; A0206
TGSVSLPAA

SEQ ID NO: 22019 - protein, 9 aa, Homo sapiens
  AACR GENIE Results; ARID1A_p.Q507Sfs*116; B3501
SAVPANCLF

SEQ ID NO: 22020 - protein, 9 aa, Homo sapiens
  AACR GENIE Results; ARID1A_p.Q507Sfs*116; B3503
AAPPEPAPL

SEQ ID NO: 22021 - protein, 9 aa, Homo sapiens
  AACR GENIE Results; ARID1A_p.Q507Sfs*116; A0205
TTTAPVLSA

SEQ ID NO: 22022 - protein, 11 aa, Homo sapiens
  AACR GENIE Results; ARID1A_p.Q507Sfs*116; A1101
SVSLPAAATSA

SEQ ID NO: 22023 - protein, 10 aa, Homo sapiens
  AACR GENIE Results; ARID1A_p.Q507Sfs*116; A1101
STLDALPAGC

SEQ ID NO: 22024 - protein, 9 aa, Homo sapiens
  AACR GENIE Results; ARID1A_p.Q507Sfs*116; B3502
FPAALPSTA

SEQ ID NO: 22025 - protein, 10 aa, Homo sapiens
  AACR GENIE Results; ARID1A_p.Q507Sfs*116; B5501
VPGSIPLPAV

SEQ ID NO: 22026 - protein, 8 aa, Homo sapiens
  AACR GENIE Results; ARID1A_p.Q507Sfs*116; B3503
LPSTAGAI

SEQ ID NO: 22027 - protein, 9 aa, Homo sapiens
  AACR GENIE Results; ARID1A_p.Q507Sfs*116; B3901
TAAPPEPAP

SEQ ID NO: 22028 - protein, 9 aa, Homo sapiens
  AACR GENIE Results; ARID1A_p.Q507Sfs*116; B0702
SAASTLDAL

SEQ ID NO: 22029 - protein, 9 aa, Homo sapiens
  AACR GENIE Results; ARID1A_p.Q507Sfs*116; B5001
ATGSVSLPA

SEQ ID NO: 22030 - protein, 9 aa, Homo sapiens
  AACR GENIE Results; ARID1A_p.Q507Sfs*116; A0201
SILPAAIPA

SEQ ID NO: 22031 - protein, 9 aa, Homo sapiens
  AACR GENIE Results; ARID1A_p.Q507Sfs*116; B4601
SAASTLDAL

SEQ ID NO: 22032 - protein, 9 aa, Homo sapiens
  AACR GENIE Results; ARID1A_p.Q507Sfs*116; B5801
AATSAASTL

SEQ ID NO: 22033 - protein, 9 aa, Homo sapiens
  AACR GENIE Results; ARID1A_p.Q507Sfs*116; C0801
AAIPASTSA

SEQ ID NO: 22034 - protein, 8 aa, Homo sapiens
  AACR GENIE Results; ARID1A_p.Q507Sfs*116; B3906
APVSAVPA

SEQ ID NO: 22035 - protein, 10 aa, Homo sapiens
  AACR GENIE Results; ARID1A_p.Q507Sfs*116; C1701
AAPPEPAPLL

SEQ ID NO: 22036 - protein, 11 aa, Homo sapiens
  AACR GENIE Results; ARID1A_p.Q507Sfs*116; B5502
TATGSVSLPAA

SEQ ID NO: 22037 - protein, 9 aa, Homo sapiens
  AACR GENIE Results; ARID1A_p.Q507Sfs*116; A0206
FPAALPSTA

SEQ ID NO: 22038 - protein, 10 aa, Homo sapiens
  AACR GENIE Results; ARID1A_p.Q507Sfs*116; A3303
LPSTAGAISR

SEQ ID NO: 22039 - protein, 9 aa, Homo sapiens
  AACR GENIE Results; ARID1A_p.Q507Sfs*116; C0303
AAIPASTSA

SEQ ID NO: 22040 - protein, 9 aa, Homo sapiens
  AACR GENIE Results; ARID1A_p.Q507Sfs*116; B1302
SASILPAAI

SEQ ID NO: 22041 - protein, 10 aa, Homo sapiens
  AACR GENIE Results; ARID1A_p.Q507Sfs*116; A3001
AVPGSIPLPA

SEQ ID NO: 22042 - protein, 9 aa, Homo sapiens
  AACR GENIE Results; ARID1A_p.Q507Sfs*116; B0702
AATSAASTL

SEQ ID NO: 22043 - protein, 10 aa, Homo sapiens
  AACR GENIE Results; ARID1A_p.Q507Sfs*116; B5502
IPASTSAVPG

SEQ ID NO: 22044 - protein, 11 aa, Homo sapiens
  AACR GENIE Results; ARID1A_p.Q507Sfs*116; B3906
APPEPAPLLTA

SEQ ID NO: 22045 - protein, 8 aa, Homo sapiens
  AACR GENIE Results; ARID1A_p.Q507Sfs*116; B0702
APVLSASI

SEQ ID NO: 22046 - protein, 10 aa, Homo sapiens
  AACR GENIE Results; ARID1A_p.Q507Sfs*116; B5001
ALPAGCVSSA

SEQ ID NO: 22047 - protein, 9 aa, Homo sapiens
  AACR GENIE Results; ARID1A_p.Q507Sfs*116; C1203
VSSAPVSAV

SEQ ID NO: 22048 - protein, 9 aa, Homo sapiens
  AACR GENIE Results; ARID1A_p.Q507Sfs*116; A6802
DTAAPPEPA

SEQ ID NO: 22049 - protein, 10 aa, Homo sapiens
  AACR GENIE Results; ARID1A_p.Q507Sfs*116; A0201
STLDALPAGC

SEQ ID NO: 22050 - protein, 11 aa, Homo sapiens
  AACR GENIE Results; ARID1A_p.Q507Sfs*116; A0301
ALPSTAGAISR

SEQ ID NO: 22051 - protein, 10 aa, Homo sapiens
  AACR GENIE Results; ARID1A_p.Q507Sfs*116; A1101
AVPGSIPLPA

SEQ ID NO: 22052 - protein, 9 aa, Homo sapiens
  AACR GENIE Results; ARID1A_p.Q507Sfs*116; A6802
STAGAISRF

SEQ ID NO: 22053 - protein, 9 aa, Homo sapiens
  AACR GENIE Results; ARID1A_p.Q507Sfs*116; A0205
AIPASTSAV

SEQ ID NO: 22054 - protein, 9 aa, Homo sapiens
  AACR GENIE Results; ARID1A_p.Q507Sfs*116; A0206
VSSAPVSAV

SEQ ID NO: 22055 - protein, 11 aa, Homo sapiens
  AACR GENIE Results; ARID1A_p.Q507Sfs*116; C0801
ATSAASTLDAL

SEQ ID NO: 22056 - protein, 8 aa, Homo sapiens
  AACR GENIE Results; ARID1A_p.Q507Sfs*116; B3906
TTAPVLSA

SEQ ID NO: 22057 - protein, 9 aa, Homo sapiens
  AACR GENIE Results; ARID1A_p.Q507Sfs*116; C0102
SAASTLDAL

SEQ ID NO: 22058 - protein, 10 aa, Homo sapiens
  AACR GENIE Results; ARID1A_p.Q507Sfs*116; A0201
ILPAAIPAST

SEQ ID NO: 22059 - protein, 9 aa, Homo sapiens
  AACR GENIE Results; ARID1A_p.Q507Sfs*116; A0201
VSSAPVSAV

SEQ ID NO: 22060 - protein, 10 aa, Homo sapiens
  AACR GENIE Results; ARID1A_p.Q507Sfs*116; A6801
IPASTSAVPG

SEQ ID NO: 22061 - protein, 8 aa, Homo sapiens
  AACR GENIE Results; ARID1A_p.Q507Sfs*116; B5101
LPAAATSA

SEQ ID NO: 22062 - protein, 9 aa, Homo sapiens
  AACR GENIE Results; ARID1A_p.Q507Sfs*116; A0205
VSSAPVSAV

SEQ ID NO: 22063 - protein, 8 aa, Homo sapiens
  AACR GENIE Results; ARID1A_p.Q507Sfs*116; B1401
DALPAGCV

SEQ ID NO: 22064 - protein, 9 aa, Homo sapiens
  AACR GENIE Results; ARID1A_p.Q507Sfs*116; C0801
TAAPPEPAP

SEQ ID NO: 22065 - protein, 9 aa, Homo sapiens
  AACR GENIE Results; ARID1A_p.Q507Sfs*116; B5701
AGAISRFIW

SEQ ID NO: 22066 - protein, 9 aa, Homo sapiens
  AACR GENIE Results; ARID1A_p.Q507Sfs*116; C0304
LTATGSVSL

SEQ ID NO: 22067 - protein, 9 aa, Homo sapiens
  AACR GENIE Results; ARID1A_p.Q507Sfs*116; C0304
VSAVPANCL

SEQ ID NO: 22068 - protein, 9 aa, Homo sapiens
  AACR GENIE Results; ARID1A_p.Q507Sfs*116; B3501
APVLSASIL

SEQ ID NO: 22069 - protein, 9 aa, Homo sapiens
  AACR GENIE Results; ARID1A_p.Q507Sfs*116; B5001
AAIPASTSA

SEQ ID NO: 22070 - protein, 10 aa, Homo sapiens
  AACR GENIE Results; ARID1A_p.Q507Sfs*116; A6802
SSAPVSAVPA

SEQ ID NO: 22071 - protein, 9 aa, Homo sapiens
  AACR GENIE Results; ARID1A_p.Q507Sfs*116; B5101
LPAAATSAA

SEQ ID NO: 22072 - protein, 9 aa, Homo sapiens
  AACR GENIE Results; ARID1A_p.Q507Sfs*116; B3501
SAVPGSIPL

SEQ ID NO: 22073 - protein, 11 aa, Homo sapiens
  AACR GENIE Results; ARID1A_p.Q507Sfs*116; A0205
AVPGSIPLPAV

SEQ ID NO: 22074 - protein, 9 aa, Homo sapiens
  AACR GENIE Results; ARID1A_p.Q507Sfs*116; B5101
LPAAIPAST

SEQ ID NO: 22075 - protein, 9 aa, Homo sapiens
  AACR GENIE Results; ARID1A_p.Q507Sfs*116; B5001
CVSSAPVSA

SEQ ID NO: 22076 - protein, 9 aa, Homo sapiens
  AACR GENIE Results; ARID1A_p.Q507Sfs*116; B3901
APPEPAPLL

SEQ ID NO: 22077 - protein, 8 aa, Homo sapiens
  AACR GENIE Results; ARID1A_p.Q507Sfs*116; B3503
LPAAATSA

SEQ ID NO: 22078 - protein, 9 aa, Homo sapiens
  AACR GENIE Results; ARID1A_p.Q507Sfs*116; A0201
VLSASILPA

SEQ ID NO: 22079 - protein, 8 aa, Homo sapiens
  AACR GENIE Results; ARID1A_p.Q507Sfs*116; B5701
GAISRFIW

SEQ ID NO: 22080 - protein, 8 aa, Homo sapiens
  AACR GENIE Results; ARID1A_p.Q507Sfs*116; B0702
STTTAPVL

SEQ ID NO: 22081 - protein, 10 aa, Homo sapiens
  AACR GENIE Results; ARID1A_p.Q507Sfs*116; B0702
APLLTATGSV

SEQ ID NO: 22082 - protein, 9 aa, Homo sapiens
  AACR GENIE Results; ARID1A_p.Q507Sfs*116; B5801
LTATGSVSL

SEQ ID NO: 22083 - protein, 10 aa, Homo sapiens
  AACR GENIE Results; ARID1A_p.R2158Q; A0201
FLSDQKNPVC

SEQ ID NO: 22084 - protein, 9 aa, Homo sapiens
  AACR GENIE Results; ARID1A_p.R2158Q; A0201
FLSDQKNPV

SEQ ID NO: 22085 - protein, 9 aa, Homo sapiens
  AACR GENIE Results; ARID1A_p.S733L; B0702
PPRPPSGQL

SEQ ID NO: 22086 - protein, 10 aa, Homo sapiens
  AACR GENIE Results; ARID1A_p.S733L; B0702
MPPRPPSGQL

SEQ ID NO: 22087 - protein, 10 aa, Homo sapiens
  AACR GENIE Results; ARID1B_p.A350dup; B2702
QRFAGQTDQH

SEQ ID NO: 22088 - protein, 11 aa, Homo sapiens
  AACR GENIE Results; ARID2_p.R572T; A6801
TTVFPNHTVKR

SEQ ID NO: 22089 - protein, 10 aa, Homo sapiens
  AACR GENIE Results; ARID2_p.R572T; A1101
TTVFPNHTVK

SEQ ID NO: 22090 - protein, 10 aa, Homo sapiens
  AACR GENIE Results; ARID2_p.R572T; A6801
TTVFPNHTVK

SEQ ID NO: 22091 - protein, 9 aa, Homo sapiens
  AACR GENIE Results; ARID2_p.R572T; C1502
TTVFPNHTV

SEQ ID NO: 22092 - protein, 9 aa, Homo sapiens
  AACR GENIE Results; ARID2_p.R572T; A6801
TTVFPNHTV

SEQ ID NO: 22093 - protein, 9 aa, Homo sapiens
  AACR GENIE Results; ARID2_p.R572T; B1302
TTVFPNHTV

SEQ ID NO: 22094 - protein, 11 aa, Homo sapiens
  AACR GENIE Results; ARID2_p.R572T; A3101
TTVFPNHTVKR

SEQ ID NO: 22095 - protein, 9 aa, Homo sapiens
  AACR GENIE Results; ARID2_p.R572T; A2402
FYKCLTTVF

SEQ ID NO: 22096 - protein, 9 aa, Homo sapiens
  AACR GENIE Results; ARID2_p.R572T; A2301
FYKCLTTVF

SEQ ID NO: 22097 - protein, 9 aa, Homo sapiens
  AACR GENIE Results; ARID2_p.R572T; A0201
TTVFPNHTV

SEQ ID NO: 22098 - protein, 10 aa, Homo sapiens
  AACR GENIE Results; ARID2_p.R572T; A0301
TTVFPNHTVK

SEQ ID NO: 22099 - protein, 10 aa, Homo sapiens
  AACR GENIE Results; ARID2_p.S759Y; B3501
GPQPVTVVNY

SEQ ID NO: 22100 - protein, 8 aa, Homo sapiens
  AACR GENIE Results; ARID2_p.S759Y; B3501
QPVTVVNY

SEQ ID NO: 22101 - protein, 9 aa, Homo sapiens
  AACR GENIE Results; ARID2_p.S759Y; B1501
PQPVTVVNY

SEQ ID NO: 22102 - protein, 9 aa, Homo sapiens
  AACR GENIE Results; ARID2_p.S759Y; A0301
VVNYQTLLH

SEQ ID NO: 22103 - protein, 8 aa, Homo sapiens
  AACR GENIE Results; ARID5B_p.R34I; B4001
LEGKPIIL

SEQ ID NO: 22104 - protein, 9 aa, Homo sapiens
  AACR GENIE Results; ARID5B_p.R34I; A3001
EGKPIILSL

SEQ ID NO: 22105 - protein, 9 aa, Homo sapiens
  AACR GENIE Results; ARID5B_p.R34I; C0501
HLEGKPIIL

SEQ ID NO: 22106 - protein, 9 aa, Homo sapiens
  AACR GENIE Results; ARID5B_p.R34I; B0801
EGKPIILSL

SEQ ID NO: 22107 - protein, 10 aa, Homo sapiens
  AACR GENIE Results; ASXL1_p.G646Wfs*12; B5801
ATTAIGGGGW

SEQ ID NO: 22108 - protein, 9 aa, Homo sapiens
  AACR GENIE Results; ASXL1_p.G646Wfs*12; B5801
TTAIGGGGW

SEQ ID NO: 22109 - protein, 9 aa, Homo sapiens
  AACR GENIE Results; ASXL1_p.G646Wfs*12; C0801
TTAIGGGGW

SEQ ID NO: 22110 - protein, 9 aa, Homo sapiens
  AACR GENIE Results; ASXL1_p.G646Wfs*12; B5701
TTAIGGGGW

SEQ ID NO: 22111 - protein, 11 aa, Homo sapiens
  AACR GENIE Results; ASXL1_p.G646Wfs*12; B5801
AATTAIGGGGW

SEQ ID NO: 22112 - protein, 9 aa, Homo sapiens
  AACR GENIE Results; ASXL1_p.G646Wfs*12; A6801
TTAIGGGGW

SEQ ID NO: 22113 - protein, 10 aa, Homo sapiens
  AACR GENIE Results; ASXL1_p.P873L; B1801
DELGLGGSCL

SEQ ID NO: 22114 - protein, 10 aa, Homo sapiens
  AACR GENIE Results; ASXL1_p.S1028L; B4001
REAAVTKGSL

SEQ ID NO: 22115 - protein, 10 aa, Homo sapiens
  AACR GENIE Results; ASXL1_p.S1028L; A1101
AVTKGSLVDK

SEQ ID NO: 22116 - protein, 9 aa, Homo sapiens
  AACR GENIE Results; ASXL1_p.S1028L; A1101
VTKGSLVDK

SEQ ID NO: 22117 - protein, 10 aa, Homo sapiens
  AACR GENIE Results; ASXL1_p.S1028L; A0301
AVTKGSLVDK

SEQ ID NO: 22118 - protein, 9 aa, Homo sapiens
  AACR GENIE Results; ASXL1_p.S1028L; A0301
VTKGSLVDK

SEQ ID NO: 22119 - protein, 9 aa, Homo sapiens
  AACR GENIE Results; ASXL1_p.S1028L; A3101
VTKGSLVDK

SEQ ID NO: 22120 - protein, 11 aa, Homo sapiens
  AACR GENIE Results; ASXL1_p.S1028L; A1101
AAVTKGSLVDK

SEQ ID NO: 22121 - protein, 9 aa, Homo sapiens
  AACR GENIE Results; ASXL1_p.S1028L; A6801
VTKGSLVDK

SEQ ID NO: 22122 - protein, 8 aa, Homo sapiens
  AACR GENIE Results; ASXL1_p.S1028L; B0801
AAVTKGSL

SEQ ID NO: 22123 - protein, 9 aa, Homo sapiens
  AACR GENIE Results; ATM_p.A2274V; B1501
TQLPERVIF

SEQ ID NO: 22124 - protein, 8 aa, Homo sapiens
  AACR GENIE Results; ATM_p.A2274V; B1501
VIFQIKQY

SEQ ID NO: 22125 - protein, 9 aa, Homo sapiens
  AACR GENIE Results; ATM_p.A2274V; B5701
RVIFQIKQY

SEQ ID NO: 22126 - protein, 9 aa, Homo sapiens
  AACR GENIE Results; ATM_p.A2274V; B5101
LPERVIFQI

SEQ ID NO: 22127 - protein, 9 aa, Homo sapiens
  AACR GENIE Results; ATM_p.A2274V; B1501
RVIFQIKQY

SEQ ID NO: 22128 - protein, 10 aa, Homo sapiens
  AACR GENIE Results; ATM_p.D2708N; A3303
DCVGSNGKER

SEQ ID NO: 22129 - protein, 10 aa, Homo sapiens
  AACR GENIE Results; ATM_p.D2708N; A6801
DCVGSNGKER

SEQ ID NO: 22130 - protein, 10 aa, Homo sapiens
  AACR GENIE Results; ATM_p.D2720Y; C0401
RYDLRQDAVM

SEQ ID NO: 22131 - protein, 9 aa, Homo sapiens
  AACR GENIE Results; ATM_p.D2721N; B3701
RDNLRQDAV

SEQ ID NO: 22132 - protein, 9 aa, Homo sapiens
  AACR GENIE Results; ATM_p.F2732L; B1501
AVMQQVLQM

SEQ ID NO: 22133 - protein, 9 aa, Homo sapiens
  AACR GENIE Results; ATM_p.F2732L; A1101
AVMQQVLQM

SEQ ID NO: 22134 - protein, 8 aa, Homo sapiens
  AACR GENIE Results; ATM_p.F2732L; B5101
DAVMQQVL

SEQ ID NO: 22135 - protein, 9 aa, Homo sapiens
  AACR GENIE Results; ATM_p.F2732L; A0301
AVMQQVLQM

SEQ ID NO: 22136 - protein, 8 aa, Homo sapiens
  AACR GENIE Results; ATM_p.F2732L; B0801
DAVMQQVL

SEQ ID NO: 22137 - protein, 9 aa, Homo sapiens
  AACR GENIE Results; ATM_p.F2732L; A0201
AVMQQVLQM

SEQ ID NO: 22138 - protein, 8 aa, Homo sapiens
  AACR GENIE Results; ATM_p.F2732L; B3501
DAVMQQVL

SEQ ID NO: 22139 - protein, 9 aa, Homo sapiens
  AACR GENIE Results; ATM_p.F2732L; A2601
AVMQQVLQM

SEQ ID NO: 22140 - protein, 9 aa, Homo sapiens
  AACR GENIE Results; ATM_p.F2732L; B3501
AVMQQVLQM

SEQ ID NO: 22141 - protein, 8 aa, Homo sapiens
  AACR GENIE Results; ATM_p.G2891D; C0501
HIDLDVAF

SEQ ID NO: 22142 - protein, 9 aa, Homo sapiens
  AACR GENIE Results; ATM_p.G2891D; B1501
VHIDLDVAF

SEQ ID NO: 22143 - protein, 9 aa, Homo sapiens
  AACR GENIE Results; ATM_p.G2891D; B3501
VHIDLDVAF

SEQ ID NO: 22144 - protein, 11 aa, Homo sapiens
  AACR GENIE Results; ATM_p.H2038Q; A0301
RTYEQEAMWGK

SEQ ID NO: 22145 - protein, 11 aa, Homo sapiens
  AACR GENIE Results; ATM_p.H2038Q; A1101
RTYEQEAMWGK

SEQ ID NO: 22146 - protein, 9 aa, Homo sapiens
  AACR GENIE Results; ATM_p.H2038Q; B4402
QEAMWGKAL

SEQ ID NO: 22147 - protein, 10 aa, Homo sapiens
  AACR GENIE Results; ATM_p.L1419I; B0702
SPDSYQKIIL

SEQ ID NO: 22148 - protein, 9 aa, Homo sapiens
  AACR GENIE Results; ATM_p.L1419I; A2301
SYQKIILAI

SEQ ID NO: 22149 - protein, 9 aa, Homo sapiens
  AACR GENIE Results; ATM_p.L1419I; A2402
SYQKIILAI

SEQ ID NO: 22150 - protein, 8 aa, Homo sapiens
  AACR GENIE Results; ATM_p.L1419I; B0801
DSYQKIIL

SEQ ID NO: 22151 - protein, 9 aa, Homo sapiens
  AACR GENIE Results; ATM_p.L1419I; B5101
SPDSYQKII

SEQ ID NO: 22152 - protein, 8 aa, Homo sapiens
  AACR GENIE Results; ATM_p.L1419I; B1402
DSYQKIIL

SEQ ID NO: 22153 - protein, 10 aa, Homo sapiens
  AACR GENIE Results; ATM_p.L1419I; B3501
SPDSYQKIIL

SEQ ID NO: 22154 - protein, 8 aa, Homo sapiens
  AACR GENIE Results; ATM_p.L1419I; B5101
DSYQKIIL

SEQ ID NO: 22155 - protein, 9 aa, Homo sapiens
  AACR GENIE Results; ATM_p.L2877F; C0304
FINEQSAEL

SEQ ID NO: 22156 - protein, 9 aa, Homo sapiens
  AACR GENIE Results; ATM_p.L2877F; C0303
FINEQSAEL

SEQ ID NO: 22157 - protein, 9 aa, Homo sapiens
  AACR GENIE Results; ATM_p.L2877F; A0201
FINEQSAEL

SEQ ID NO: 22158 - protein, 9 aa, Homo sapiens
  AACR GENIE Results; ATM_p.L2877F; C0102
FINEQSAEL

SEQ ID NO: 22159 - protein, 9 aa, Homo sapiens
  AACR GENIE Results; ATM_p.L2877F; B1501
FINEQSAEL

SEQ ID NO: 22160 - protein, 9 aa, Homo sapiens
  AACR GENIE Results; ATM_p.L2877F; B3501
FINEQSAEL

SEQ ID NO: 22161 - protein, 9 aa, Homo sapiens
  AACR GENIE Results; ATM_p.L2877F; C0202
FINEQSAEL

SEQ ID NO: 22162 - protein, 9 aa, Homo sapiens
  AACR GENIE Results; ATM_p.L2877F; B0801
FINEQSAEL

SEQ ID NO: 22163 - protein, 10 aa, Homo sapiens
  AACR GENIE Results; ATM_p.L2877F; A2402
IFINEQSAEL

SEQ ID NO: 22164 - protein, 9 aa, Homo sapiens
  AACR GENIE Results; ATM_p.L2877F; B0702
FINEQSAEL

SEQ ID NO: 22165 - protein, 8 aa, Homo sapiens
  AACR GENIE Results; ATM_p.P2699L; A1101
AGGVNLLK

SEQ ID NO: 22166 - protein, 9 aa, Homo sapiens
  AACR GENIE Results; ATM_p.P2699L; A0201
NLLKIIDCV

SEQ ID NO: 22167 - protein, 10 aa, Homo sapiens
  AACR GENIE Results; ATM_p.P2699L; A0301
RLAGGVNLLK

SEQ ID NO: 22168 - protein, 9 aa, Homo sapiens
  AACR GENIE Results; ATM_p.P2699L; A1101
LAGGVNLLK

SEQ ID NO: 22169 - protein, 9 aa, Homo sapiens
  AACR GENIE Results; ATM_p.P2699L; A0301
RLAGGVNLL

SEQ ID NO: 22170 - protein, 8 aa, Homo sapiens
  AACR GENIE Results; ATM_p.Q2724K; B0801
DLRKDAVM

SEQ ID NO: 22171 - protein, 9 aa, Homo sapiens
  AACR GENIE Results; ATM_p.Q2724K; B0702
KDAVMQQVF

SEQ ID NO: 22172 - protein, 9 aa, Homo sapiens
  AACR GENIE Results; ATM_p.Q2724K; B4402
KDAVMQQVF

SEQ ID NO: 22173 - protein, 9 aa, Homo sapiens
  AACR GENIE Results; ATM_p.Q2730L; C0602
LRQDAVMQL

SEQ ID NO: 22174 - protein, 8 aa, Homo sapiens
  AACR GENIE Results; ATM_p.Q2730L; B3501
DAVMQLVF

SEQ ID NO: 22175 - protein, 9 aa, Homo sapiens
  AACR GENIE Results; ATM_p.Q2730L; A1101
AVMQLVFQM

SEQ ID NO: 22176 - protein, 9 aa, Homo sapiens
  AACR GENIE Results; ATM_p.Q2730L; C0702
LRQDAVMQL

SEQ ID NO: 22177 - protein, 9 aa, Homo sapiens
  AACR GENIE Results; ATM_p.Q2730L; C0701
LRQDAVMQL

SEQ ID NO: 22178 - protein, 9 aa, Homo sapiens
  AACR GENIE Results; ATM_p.Q2730L; A0201
AVMQLVFQM

SEQ ID NO: 22179 - protein, 9 aa, Homo sapiens
  AACR GENIE Results; ATM_p.R2227C; B1302
ALCTVILEI

SEQ ID NO: 22180 - protein, 9 aa, Homo sapiens
  AACR GENIE Results; ATM_p.R2227C; B5101
EPIMALCTV

SEQ ID NO: 22181 - protein, 9 aa, Homo sapiens
  AACR GENIE Results; ATM_p.R2227C; A0201
ALCTVILEI

SEQ ID NO: 22182 - protein, 9 aa, Homo sapiens
  AACR GENIE Results; ATM_p.R2443Q; C0304
YTVKVQQEL

SEQ ID NO: 22183 - protein, 9 aa, Homo sapiens
  AACR GENIE Results; ATM_p.R2443Q; C0303
YTVKVQQEL

SEQ ID NO: 22184 - protein, 9 aa, Homo sapiens
  AACR GENIE Results; ATM_p.R2443Q; C1502
YTVKVQQEL

SEQ ID NO: 22185 - protein, 10 aa, Homo sapiens
  AACR GENIE Results; ATM_p.R2443Q; B4001
QELELDELAL

SEQ ID NO: 22186 - protein, 9 aa, Homo sapiens
  AACR GENIE Results; ATM_p.R2443Q; B1302
YTVKVQQEL

SEQ ID NO: 22187 - protein, 8 aa, Homo sapiens
  AACR GENIE Results; ATM_p.R2443Q; B0801
TVKVQQEL

SEQ ID NO: 22188 - protein, 10 aa, Homo sapiens
  AACR GENIE Results; ATM_p.R2443Q; A3001
QELELDELAL

SEQ ID NO: 22189 - protein, 9 aa, Homo sapiens
  AACR GENIE Results; ATM_p.R2443Q; A3001
YTVKVQQEL

SEQ ID NO: 22190 - protein, 9 aa, Homo sapiens
  AACR GENIE Results; ATM_p.R2443Q; B5701
YTVKVQQEL

SEQ ID NO: 22191 - protein, 9 aa, Homo sapiens
  AACR GENIE Results; ATM_p.R2443Q; C1203
YTVKVQQEL

SEQ ID NO: 22192 - protein, 9 aa, Homo sapiens
  AACR GENIE Results; ATM_p.R2443Q; C1601
YTVKVQQEL

SEQ ID NO: 22193 - protein, 8 aa, Homo sapiens
  AACR GENIE Results; ATM_p.R2443Q; B1501
TVKVQQEL

SEQ ID NO: 22194 - protein, 9 aa, Homo sapiens
  AACR GENIE Results; ATM_p.R2443Q; C0202
YTVKVQQEL

SEQ ID NO: 22195 - protein, 9 aa, Homo sapiens
  AACR GENIE Results; ATM_p.R2443Q; B4001
YTVKVQQEL

SEQ ID NO: 22196 - protein, 9 aa, Homo sapiens
  AACR GENIE Results; ATM_p.R2443Q; A6801
YTVKVQQEL

SEQ ID NO: 22197 - protein, 9 aa, Homo sapiens
  AACR GENIE Results; ATM_p.R2443Q; B3501
YTVKVQQEL

SEQ ID NO: 22198 - protein, 9 aa, Homo sapiens
  AACR GENIE Results; ATM_p.R3008C; A0301
KVAECVLMR

SEQ ID NO: 22199 - protein, 9 aa, Homo sapiens
  AACR GENIE Results; ATM_p.R3008C; A1101
KVAECVLMR

SEQ ID NO: 22200 - protein, 9 aa, Homo sapiens
  AACR GENIE Results; ATM_p.R3008C; B5001
QSFNKVAEC

SEQ ID NO: 22201 - protein, 9 aa, Homo sapiens
  AACR GENIE Results; ATM_p.R3008C; A3101
KVAECVLMR

SEQ ID NO: 22202 - protein, 9 aa, Homo sapiens
  AACR GENIE Results; ATM_p.R3008H; A0301
KVAEHVLMR

SEQ ID NO: 22203 - protein, 9 aa, Homo sapiens
  AACR GENIE Results; ATM_p.R3008H; A1101
KVAEHVLMR

SEQ ID NO: 22204 - protein, 10 aa, Homo sapiens
  AACR GENIE Results; ATM_p.R3008H; A0301
KVAEHVLMRL

SEQ ID NO: 22205 - protein, 9 aa, Homo sapiens
  AACR GENIE Results; ATM_p.R3008H; A3101
KVAEHVLMR

SEQ ID NO: 22206 - protein, 9 aa, Homo sapiens
  AACR GENIE Results; ATM_p.R3008H; A6801
KVAEHVLMR

SEQ ID NO: 22207 - protein, 8 aa, Homo sapiens
  AACR GENIE Results; ATM_p.R3008H; B4403
AEHVLMRL

SEQ ID NO: 22208 - protein, 9 aa, Homo sapiens
  AACR GENIE Results; ATM_p.R337C; A2402
KYSSGFCNI

SEQ ID NO: 22209 - protein, 9 aa, Homo sapiens
  AACR GENIE Results; ATM_p.R337C; A2301
KYSSGFCNI

SEQ ID NO: 22210 - protein, 9 aa, Homo sapiens
  AACR GENIE Results; ATM_p.R337H; A2402
KYSSGFHNI

SEQ ID NO: 22211 - protein, 9 aa, Homo sapiens
  AACR GENIE Results; ATM_p.R337H; A2301
KYSSGFHNI

SEQ ID NO: 22212 - protein, 9 aa, Homo sapiens
  AACR GENIE Results; ATM_p.R337H; C1203
YSSGFHNIA

SEQ ID NO: 22213 - protein, 9 aa, Homo sapiens
  AACR GENIE Results; ATM_p.R337H; A1101
SGFHNIAVK

SEQ ID NO: 22214 - protein, 9 aa, Homo sapiens
  AACR GENIE Results; ATM_p.R337H; B3801
HNIAVKENL

SEQ ID NO: 22215 - protein, 9 aa, Homo sapiens
  AACR GENIE Results; ATM_p.R337H; C1502
SSGFHNIAV

SEQ ID NO: 22216 - protein, 9 aa, Homo sapiens
  AACR GENIE Results; ATM_p.R337H; A3001
SGFHNIAVK

SEQ ID NO: 22217 - protein, 10 aa, Homo sapiens
  AACR GENIE Results; ATM_p.R337H; C1502
YSSGFHNIAV

SEQ ID NO: 22218 - protein, 9 aa, Homo sapiens
  AACR GENIE Results; ATM_p.R337H; A3001
YSSGFHNIA

SEQ ID NO: 22219 - protein, 10 aa, Homo sapiens
  AACR GENIE Results; ATM_p.R337H; B3801
FHNIAVKENL

SEQ ID NO: 22220 - protein, 9 aa, Homo sapiens
  AACR GENIE Results; ATM_p.R337H; A6801
SGFHNIAVK

SEQ ID NO: 22221 - protein, 9 aa, Homo sapiens
  AACR GENIE Results; ATM_p.R337H; A0301
SGFHNIAVK

SEQ ID NO: 22222 - protein, 10 aa, Homo sapiens
  AACR GENIE Results; ATM_p.S2812Vfs*3; B5701
KMMEVQKKVF

SEQ ID NO: 22223 - protein, 8 aa, Homo sapiens
  AACR GENIE Results; ATM_p.S2812Vfs*3; B1801
MEVQKKVF

SEQ ID NO: 22224 - protein, 8 aa, Homo sapiens
  AACR GENIE Results; ATM_p.S2812Vfs*3; B0801
MEVQKKVF

SEQ ID NO: 22225 - protein, 10 aa, Homo sapiens
  AACR GENIE Results; ATM_p.S2812Vfs*3; B1501
KMMEVQKKVF

SEQ ID NO: 22226 - protein, 8 aa, Homo sapiens
  AACR GENIE Results; ATM_p.S2812Vfs*3; B4403
MEVQKKVF

SEQ ID NO: 22227 - protein, 9 aa, Homo sapiens
  AACR GENIE Results; ATM_p.S2812Vfs*3; A0201
KMMEVQKKV

SEQ ID NO: 22228 - protein, 10 aa, Homo sapiens
  AACR GENIE Results; ATM_p.S2812Vfs*3; B4403
KMMEVQKKVF

SEQ ID NO: 22229 - protein, 10 aa, Homo sapiens
  AACR GENIE Results; ATM_p.S2812Vfs*3; A0301
KMMEVQKKVF

SEQ ID NO: 22230 - protein, 10 aa, Homo sapiens
  AACR GENIE Results; ATM_p.S2812Vfs*3; A2402
KMMEVQKKVF

SEQ ID NO: 22231 - protein, 9 aa, Homo sapiens
  AACR GENIE Results; ATM_p.T1697A; C0602
SYAKALKLF

SEQ ID NO: 22232 - protein, 9 aa, Homo sapiens
  AACR GENIE Results; ATM_p.T1697A; A2402
SYAKALKLF

SEQ ID NO: 22233 - protein, 9 aa, Homo sapiens
  AACR GENIE Results; ATM_p.T1697A; A0301
ASYAKALKL

SEQ ID NO: 22234 - protein, 9 aa, Homo sapiens
  AACR GENIE Results; ATM_p.T1697A; C1203
ASYAKALKL

SEQ ID NO: 22235 - protein, 8 aa, Homo sapiens
  AACR GENIE Results; ATM_p.T1697A; B5101
DASYAKAL

SEQ ID NO: 22236 - protein, 9 aa, Homo sapiens
  AACR GENIE Results; ATM_p.T1697A; A1101
ASYAKALKL

SEQ ID NO: 22237 - protein, 8 aa, Homo sapiens
  AACR GENIE Results; ATM_p.T1697A; B0801
DASYAKAL

SEQ ID NO: 22238 - protein, 9 aa, Homo sapiens
  AACR GENIE Results; ATM_p.T1697A; B0702
KDASYAKAL

SEQ ID NO: 22239 - protein, 9 aa, Homo sapiens
  AACR GENIE Results; ATM_p.T1697A; A1101
HSKDASYAK

SEQ ID NO: 22240 - protein, 9 aa, Homo sapiens
  AACR GENIE Results; ATM_p.T1697A; B4403
KDASYAKAL

SEQ ID NO: 22241 - protein, 9 aa, Homo sapiens
  AACR GENIE Results; ATM_p.T1697A; C1601
ASYAKALKL

SEQ ID NO: 22242 - protein, 9 aa, Homo sapiens
  AACR GENIE Results; ATM_p.T1697A; C0304
ASYAKALKL

SEQ ID NO: 22243 - protein, 10 aa, Homo sapiens
  AACR GENIE Results; ATM_p.V2424G; A3101
RAKEEGGLLR

SEQ ID NO: 22244 - protein, 9 aa, Homo sapiens
  AACR GENIE Results; ATM_p.V2424G; B4402
EEGGLLREH

SEQ ID NO: 22245 - protein, 9 aa, Homo sapiens
  AACR GENIE Results; ATM_p.V2424G; B0702
RAKEEGGLL

SEQ ID NO: 22246 - protein, 9 aa, Homo sapiens
  AACR GENIE Results; ATM_p.W2960L; C0304
LTMNPLKAL

SEQ ID NO: 22247 - protein, 9 aa, Homo sapiens
  AACR GENIE Results; ATM_p.W2960L; C0401
LFDLTMNPL

SEQ ID NO: 22248 - protein, 8 aa, Homo sapiens
  AACR GENIE Results; ATM_p.W2960L; B3501
DPLFDLTM

SEQ ID NO: 22249 - protein, 9 aa, Homo sapiens
  AACR GENIE Results; ATM_p.W2960L; A0201
LLYDPLFDL

SEQ ID NO: 22250 - protein, 10 aa, Homo sapiens
  AACR GENIE Results; ATM_p.W2960L; A2601
LTMNPLKALY

SEQ ID NO: 22251 - protein, 8 aa, Homo sapiens
  AACR GENIE Results; ATM_p.W2960L; C0702
LYDPLFDL

SEQ ID NO: 22252 - protein, 11 aa, Homo sapiens
  AACR GENIE Results; ATM_p.W2960L; A0201
LLYDPLFDLTM

SEQ ID NO: 22253 - protein, 10 aa, Homo sapiens
  AACR GENIE Results; ATM_p.W2960L; A0101
LTMNPLKALY

SEQ ID NO: 22254 - protein, 8 aa, Homo sapiens
  AACR GENIE Results; ATM_p.W412L; B5101
DLVPLLQI

SEQ ID NO: 22255 - protein, 10 aa, Homo sapiens
  AACR GENIE Results; ATM_p.W412L; B0702
VPLLQIATQL

SEQ ID NO: 22256 - protein, 8 aa, Homo sapiens
  AACR GENIE Results; ATM_p.W412L; C0401
DFDLVPLL

SEQ ID NO: 22257 - protein, 8 aa, Homo sapiens
  AACR GENIE Results; ATR_p.D1560N; B3801
KHDNQHTI

SEQ ID NO: 22258 - protein, 9 aa, Homo sapiens
  AACR GENIE Results; ATRX_p.A345T; A1101
SYSTLIVPK

SEQ ID NO: 22259 - protein, 11 aa, Homo sapiens
  AACR GENIE Results; ATRX_p.A345T; A1101
STLIVPKEMIK

SEQ ID NO: 22260 - protein, 11 aa, Homo sapiens
  AACR GENIE Results; ATRX_p.A345T; A0301
TLIVPKEMIKK

SEQ ID NO: 22261 - protein, 9 aa, Homo sapiens
  AACR GENIE Results; ATRX_p.A345T; A0301
SYSTLIVPK

SEQ ID NO: 22262 - protein, 10 aa, Homo sapiens
  AACR GENIE Results; ATRX_p.A345T; A1101
YSYSTLIVPK

SEQ ID NO: 22263 - protein, 9 aa, Homo sapiens
  AACR GENIE Results; ATRX_p.A345T; B5701
STLIVPKEM

SEQ ID NO: 22264 - protein, 9 aa, Homo sapiens
  AACR GENIE Results; ATRX_p.A345T; A6801
SYSTLIVPK

SEQ ID NO: 22265 - protein, 8 aa, Homo sapiens
  AACR GENIE Results; ATRX_p.A345T; A1101
YSTLIVPK

SEQ ID NO: 22266 - protein, 10 aa, Homo sapiens
  AACR GENIE Results; ATRX_p.A345T; A0301
YSYSTLIVPK

SEQ ID NO: 22267 - protein, 9 aa, Homo sapiens
  AACR GENIE Results; ATRX_p.A345T; A1101
STLIVPKEM

SEQ ID NO: 22268 - protein, 9 aa, Homo sapiens
  AACR GENIE Results; ATRX_p.A345T; C1601
STLIVPKEM

SEQ ID NO: 22269 - protein, 9 aa, Homo sapiens
  AACR GENIE Results; ATRX_p.S1155L; B4001
KEIQSGSSL

SEQ ID NO: 22270 - protein, 9 aa, Homo sapiens
  AACR GENIE Results; ATRX_p.S1155L; B0702
KEIQSGSSL

SEQ ID NO: 22271 - protein, 9 aa, Homo sapiens
  AACR GENIE Results; ATRX_p.S1155L; B1501
KEIQSGSSL

SEQ ID NO: 22272 - protein, 9 aa, Homo sapiens
  AACR GENIE Results; ATRX_p.S1155L; B4403
KEIQSGSSL

SEQ ID NO: 22273 - protein, 9 aa, Homo sapiens
  AACR GENIE Results; ATRX_p.S1155L; B4402
KEIQSGSSL

SEQ ID NO: 22274 - protein, 9 aa, Homo sapiens
  AACR GENIE Results; ATRX_p.S1155L; C0304
KEIQSGSSL

SEQ ID NO: 22275 - protein, 9 aa, Homo sapiens
  AACR GENIE Results; ATRX_p.S1155L; C0102
KEIQSGSSL

SEQ ID NO: 22276 - protein, 9 aa, Homo sapiens
  AACR GENIE Results; ATRX_p.S1155L; C0303
KEIQSGSSL

SEQ ID NO: 22277 - protein, 8 aa, Homo sapiens
  AACR GENIE Results; ATRX_p.S1174F; B0801
SFKKKAVI

SEQ ID NO: 22278 - protein, 9 aa, Homo sapiens
  AACR GENIE Results; ATRX_p.V1731F; B3501
EASAFSKAM

SEQ ID NO: 22279 - protein, 10 aa, Homo sapiens
  AACR GENIE Results; ATRX_p.V1731F; B4402
NEASAFSKAM

SEQ ID NO: 22280 - protein, 9 aa, Homo sapiens
  AACR GENIE Results; ATRX_p.V1731F; B0702
AFSKAMNSI

SEQ ID NO: 22281 - protein, 11 aa, Homo sapiens
  AACR GENIE Results; ATRX_p.V1731F; A0301
ILKNEASAFSK

SEQ ID NO: 22282 - protein, 9 aa, Homo sapiens
  AACR GENIE Results; ATRX_p.V1731F; B0801
ILKNEASAF

SEQ ID NO: 22283 - protein, 8 aa, Homo sapiens
  AACR GENIE Results; ATRX_p.V1731F; C1203
FSKAMNSI

SEQ ID NO: 22284 - protein, 9 aa, Homo sapiens
  AACR GENIE Results; ATRX_p.V1731F; B0702
ILKNEASAF

SEQ ID NO: 22285 - protein, 9 aa, Homo sapiens
  AACR GENIE Results; ATRX_p.V1731F; A0301
ILKNEASAF

SEQ ID NO: 22286 - protein, 9 aa, Homo sapiens
  AACR GENIE Results; AXIN2_p.M5Vfs*14; B5101
LPPGPQQQL

SEQ ID NO: 22287 - protein, 10 aa, Homo sapiens
  AACR GENIE Results; B2M_p.L15Ffs*41; A2902
SFWPGGYPAY

SEQ ID NO: 22288 - protein, 8 aa, Homo sapiens
  AACR GENIE Results; B2M_p.L15Ffs*41; B5701
LTSSSREW

SEQ ID NO: 22289 - protein, 9 aa, Homo sapiens
  AACR GENIE Results; B2M_p.R101P; C0102
ACPVNHVTL

SEQ ID NO: 22290 - protein, 10 aa, Homo sapiens
  AACR GENIE Results; B2M_p.R101P; C0304
YACPVNHVTL

SEQ ID NO: 22291 - protein, 10 aa, Homo sapiens
  AACR GENIE Results; B2M_p.R101P; C0303
YACPVNHVTL

SEQ ID NO: 22292 - protein, 10 aa, Homo sapiens
  AACR GENIE Results; B2M_p.R101P; C1203
YACPVNHVTL

SEQ ID NO: 22293 - protein, 8 aa, Homo sapiens
  AACR GENIE Results; B2M_p.R101P; B5101
YACPVNHV

SEQ ID NO: 22294 - protein, 8 aa, Homo sapiens
  AACR GENIE Results; B2M_p.R101P; B0801
CPVNHVTL

SEQ ID NO: 22295 - protein, 8 aa, Homo sapiens
  AACR GENIE Results; B2M_p.R101P; B0702
CPVNHVTL

SEQ ID NO: 22296 - protein, 9 aa, Homo sapiens
  AACR GENIE Results; B2M_p.R101P; B1801
DEYACPVNH

SEQ ID NO: 22297 - protein, 9 aa, Homo sapiens
  AACR GENIE Results; BAP1_p.P293L; C1203
SASNKSLLV

SEQ ID NO: 22298 - protein, 9 aa, Homo sapiens
  AACR GENIE Results; BAP1_p.Y173C; B5101
EAFHFVSCV

SEQ ID NO: 22299 - protein, 9 aa, Homo sapiens
  AACR GENIE Results; BAP1_p.Y173C; A1101
VSCVPITGR

SEQ ID NO: 22300 - protein, 9 aa, Homo sapiens
  AACR GENIE Results; BCL6_p.N73S; B1302
SVISLDPEI

SEQ ID NO: 22301 - protein, 9 aa, Homo sapiens
  AACR GENIE Results; BCL6_p.N73S; A0201
SVISLDPEI

SEQ ID NO: 22302 - protein, 9 aa, Homo sapiens
  AACR GENIE Results; BCL6_p.N73S; B3801
SVISLDPEI

SEQ ID NO: 22303 - protein, 9 aa, Homo sapiens
  AACR GENIE Results; BCL6_p.N73S; A2601
SVISLDPEI

SEQ ID NO: 22304 - protein, 9 aa, Homo sapiens
  AACR GENIE Results; BLM_p.H281P; B4001
AELPSTEKV

SEQ ID NO: 22305 - protein, 9 aa, Homo sapiens
  AACR GENIE Results; BLM_p.H281P; B4403
AELPSTEKV

SEQ ID NO: 22306 - protein, 9 aa, Homo sapiens
  AACR GENIE Results; BLM_p.P822S; C0304
FSSVPVMAL

SEQ ID NO: 22307 - protein, 9 aa, Homo sapiens
  AACR GENIE Results; BLM_p.P822S; C1203
FSSVPVMAL

SEQ ID NO: 22308 - protein, 9 aa, Homo sapiens
  AACR GENIE Results; BLM_p.S232R; B4403
SEWLRSDVI

SEQ ID NO: 22309 - protein, 10 aa, Homo sapiens
  AACR GENIE Results; BMPR1A_p.R480Q; B5701
RLQPIVSNRW

SEQ ID NO: 22310 - protein, 9 aa, Homo sapiens
  AACR GENIE Results; BMPR1A_p.R480Q; A0301
RLQPIVSNR

SEQ ID NO: 22311 - protein, 9 aa, Homo sapiens
  AACR GENIE Results; BMPR1A_p.R486W; B5701
RLRPIVSNW

SEQ ID NO: 22312 - protein, 10 aa, Homo sapiens
  AACR GENIE Results; BMPR1A_p.R486W; B5701
RLRPIVSNWW

SEQ ID NO: 22313 - protein, 9 aa, Homo sapiens
  AACR GENIE Results; BRAF_p.D594G; A1101
GGFGLATVK

SEQ ID NO: 22314 - protein, 9 aa, Homo sapiens
  AACR GENIE Results; BRAF_p.D594G; A3001
TVKIGGFGL

SEQ ID NO: 22315 - protein, 9 aa, Homo sapiens
  AACR GENIE Results; BRAF_p.D594N; A1101
GNFGLATVK

SEQ ID NO: 22316 - protein, 9 aa, Homo sapiens
  AACR GENIE Results; BRAF_p.D594N; A3001
TVKIGNFGL

SEQ ID NO: 22317 - protein, 9 aa, Homo sapiens
  AACR GENIE Results; BRAF_p.G464V; B1501
GQRIVSGSF

SEQ ID NO: 22318 - protein, 9 aa, Homo sapiens
  AACR GENIE Results; BRAF_p.G464V; B1501
VSGSFGTVY

SEQ ID NO: 22319 - protein, 10 aa, Homo sapiens
  AACR GENIE Results; BRAF_p.G464V; B1501
IVSGSFGTVY

SEQ ID NO: 22320 - protein, 11 aa, Homo sapiens
  AACR GENIE Results; BRAF_p.G464V; A1101
IVSGSFGTVYK

SEQ ID NO: 22321 - protein, 11 aa, Homo sapiens
  AACR GENIE Results; BRAF_p.G464V; B1501
RIVSGSFGTVY

SEQ ID NO: 22322 - protein, 10 aa, Homo sapiens
  AACR GENIE Results; BRAF_p.G464V; A1101
VSGSFGTVYK

SEQ ID NO: 22323 - protein, 9 aa, Homo sapiens
  AACR GENIE Results; BRAF_p.G466A; B1501
GQRIGSASF

SEQ ID NO: 22324 - protein, 10 aa, Homo sapiens
  AACR GENIE Results; BRAF_p.G466A; A1101
GSASFGTVYK

SEQ ID NO: 22325 - protein, 9 aa, Homo sapiens
  AACR GENIE Results; BRAF_p.G466A; B1501
GSASFGTVY

SEQ ID NO: 22326 - protein, 9 aa, Homo sapiens
  AACR GENIE Results; BRAF_p.G466A; A1101
SASFGTVYK

SEQ ID NO: 22327 - protein, 10 aa, Homo sapiens
  AACR GENIE Results; BRAF_p.G466A; A0301
GSASFGTVYK

SEQ ID NO: 22328 - protein, 8 aa, Homo sapiens
  AACR GENIE Results; BRAF_p.G466A; A1101
ASFGTVYK

SEQ ID NO: 22329 - protein, 10 aa, Homo sapiens
  AACR GENIE Results; BRAF_p.G466A; A1101
ASFGTVYKGK

SEQ ID NO: 22330 - protein, 11 aa, Homo sapiens
  AACR GENIE Results; BRAF_p.G466A; B1501
RIGSASFGTVY

SEQ ID NO: 22331 - protein, 8 aa, Homo sapiens
  AACR GENIE Results; BRAF_p.G466A; B1501
SASFGTVY

SEQ ID NO: 22332 - protein, 9 aa, Homo sapiens
  AACR GENIE Results; BRAF_p.G466E; A0101
GSESFGTVY

SEQ ID NO: 22333 - protein, 9 aa, Homo sapiens
  AACR GENIE Results; BRAF_p.G466R; B1501
GQRIGSRSF

SEQ ID NO: 22334 - protein, 9 aa, Homo sapiens
  AACR GENIE Results; BRAF_p.G466R; B1501
GSRSFGTVY

SEQ ID NO: 22335 - protein, 10 aa, Homo sapiens
  AACR GENIE Results; BRAF_p.G466R; A0301
GSRSFGTVYK

SEQ ID NO: 22336 - protein, 9 aa, Homo sapiens
  AACR GENIE Results; BRAF_p.G466V; B1501
GQRIGSVSF

SEQ ID NO: 22337 - protein, 9 aa, Homo sapiens
  AACR GENIE Results; BRAF_p.G466V; A1101
SVSFGTVYK

SEQ ID NO: 22338 - protein, 10 aa, Homo sapiens
  AACR GENIE Results; BRAF_p.G466V; A1101
GSVSFGTVYK

SEQ ID NO: 22339 - protein, 9 aa, Homo sapiens
  AACR GENIE Results; BRAF_p.G466V; B1501
GSVSFGTVY

SEQ ID NO: 22340 - protein, 9 aa, Homo sapiens
  AACR GENIE Results; BRAF_p.G466V; A0301
SVSFGTVYK

SEQ ID NO: 22341 - protein, 11 aa, Homo sapiens
  AACR GENIE Results; BRAF_p.G466V; B5701
VSFGTVYKGKW

SEQ ID NO: 22342 - protein, 9 aa, Homo sapiens
  AACR GENIE Results; BRAF_p.G466V; B5801
GSVSFGTVY

SEQ ID NO: 22343 - protein, 10 aa, Homo sapiens
  AACR GENIE Results; BRAF_p.G466V; A0301
GSVSFGTVYK

SEQ ID NO: 22344 - protein, 9 aa, Homo sapiens
  AACR GENIE Results; BRAF_p.G466V; A3002
GSVSFGTVY

SEQ ID NO: 22345 - protein, 8 aa, Homo sapiens
  AACR GENIE Results; BRAF_p.G466V; B1501
SVSFGTVY

SEQ ID NO: 22346 - protein, 9 aa, Homo sapiens
  AACR GENIE Results; BRAF_p.G466V; A6801
SVSFGTVYK

SEQ ID NO: 22347 - protein, 9 aa, Homo sapiens
  AACR GENIE Results; BRAF_p.G469A; A1101
SGSFATVYK

SEQ ID NO: 22348 - protein, 9 aa, Homo sapiens
  AACR GENIE Results; BRAF_p.G469A; B1501
GSGSFATVY

SEQ ID NO: 22349 - protein, 10 aa, Homo sapiens
  AACR GENIE Results; BRAF_p.G469A; A1101
GSGSFATVYK

SEQ ID NO: 22350 - protein, 9 aa, Homo sapiens
  AACR GENIE Results; BRAF_p.G469A; A3002
GSGSFATVY

SEQ ID NO: 22351 - protein, 11 aa, Homo sapiens
  AACR GENIE Results; BRAF_p.G469A; B3901
QRIGSGSFATV

SEQ ID NO: 22352 - protein, 10 aa, Homo sapiens
  AACR GENIE Results; BRAF_p.G469A; A3002
IGSGSFATVY

SEQ ID NO: 22353 - protein, 8 aa, Homo sapiens
  AACR GENIE Results; BRAF_p.G469A; A1101
GSFATVYK

SEQ ID NO: 22354 - protein, 11 aa, Homo sapiens
  AACR GENIE Results; BRAF_p.G469A; B1501
RIGSGSFATVY

SEQ ID NO: 22355 - protein, 9 aa, Homo sapiens
  AACR GENIE Results; BRAF_p.G469R; B1501
GSGSFRTVY

SEQ ID NO: 22356 - protein, 9 aa, Homo sapiens
  AACR GENIE Results; BRAF_p.G469R; A1101
SGSFRTVYK

SEQ ID NO: 22357 - protein, 9 aa, Homo sapiens
  AACR GENIE Results; BRAF_p.G469S; A1101
SGSFSTVYK

SEQ ID NO: 22358 - protein, 10 aa, Homo sapiens
  AACR GENIE Results; BRAF_p.G469S; A1101
GSGSFSTVYK

SEQ ID NO: 22359 - protein, 9 aa, Homo sapiens
  AACR GENIE Results; BRAF_p.G469S; B1501
GSGSFSTVY

SEQ ID NO: 22360 - protein, 10 aa, Homo sapiens
  AACR GENIE Results; BRAF_p.G469S; A0301
GSGSFSTVYK

SEQ ID NO: 22361 - protein, 8 aa, Homo sapiens
  AACR GENIE Results; BRAF_p.G469S; A1101
GSFSTVYK

SEQ ID NO: 22362 - protein, 11 aa, Homo sapiens
  AACR GENIE Results; BRAF_p.G469S; A1101
IGSGSFSTVYK

SEQ ID NO: 22363 - protein, 9 aa, Homo sapiens
  AACR GENIE Results; BRAF_p.G469V; A1101
SGSFVTVYK

SEQ ID NO: 22364 - protein, 9 aa, Homo sapiens
  AACR GENIE Results; BRAF_p.G469V; B1501
GSGSFVTVY

SEQ ID NO: 22365 - protein, 10 aa, Homo sapiens
  AACR GENIE Results; BRAF_p.G469V; A1101
GSGSFVTVYK

SEQ ID NO: 22366 - protein, 10 aa, Homo sapiens
  AACR GENIE Results; BRAF_p.G469V; A0301
GSGSFVTVYK

SEQ ID NO: 22367 - protein, 9 aa, Homo sapiens
  AACR GENIE Results; BRAF_p.G469V; A6801
SGSFVTVYK

SEQ ID NO: 22368 - protein, 8 aa, Homo sapiens
  AACR GENIE Results; BRAF_p.G469V; A1101
GSFVTVYK

SEQ ID NO: 22369 - protein, 8 aa, Homo sapiens
  AACR GENIE Results; BRAF_p.G469V; B1501
SGSFVTVY

SEQ ID NO: 22370 - protein, 9 aa, Homo sapiens
  AACR GENIE Results; BRAF_p.G469V; A0301
SGSFVTVYK

SEQ ID NO: 22371 - protein, 8 aa, Homo sapiens
  AACR GENIE Results; BRAF_p.K483E; B5101
VAVEMLNV

SEQ ID NO: 22372 - protein, 8 aa, Homo sapiens
  AACR GENIE Results; BRAF_p.K601E; B5701
LATVESRW

SEQ ID NO: 22373 - protein, 9 aa, Homo sapiens
  AACR GENIE Results; BRAF_p.K601E; B5701
GLATVESRW

SEQ ID NO: 22374 - protein, 10 aa, Homo sapiens
  AACR GENIE Results; BRAF_p.K601E; B5701
FGLATVESRW

SEQ ID NO: 22375 - protein, 9 aa, Homo sapiens
  AACR GENIE Results; BRAF_p.K601E; B2702
FGLATVESR

SEQ ID NO: 22376 - protein, 8 aa, Homo sapiens
  AACR GENIE Results; BRAF_p.K601N; B5701
LATVNSRW

SEQ ID NO: 22377 - protein, 10 aa, Homo sapiens
  AACR GENIE Results; BRAF_p.K601N; B5701
FGLATVNSRW

SEQ ID NO: 22378 - protein, 9 aa, Homo sapiens
  AACR GENIE Results; BRAF_p.K601N; B5701
GLATVNSRW

SEQ ID NO: 22379 - protein, 9 aa, Homo sapiens
  AACR GENIE Results; BRAF_p.L382M; B1801
DDMIRDQGF

SEQ ID NO: 22380 - protein, 11 aa, Homo sapiens
  AACR GENIE Results; BRAF_p.V600E; A0302
KIGDFGLATEK

SEQ ID NO: 22381 - protein, 11 aa, Homo sapiens
  AACR GENIE Results; BRAF_p.V600E; A0301
KIGDFGLATEK

SEQ ID NO: 22382 - protein, 9 aa, Homo sapiens
  AACR GENIE Results; BRAF_p.V600E; B2702
GDFGLATEK

SEQ ID NO: 22383 - protein, 10 aa, Homo sapiens
  AACR GENIE Results; BRAF_p.V600E; B2702
IGDFGLATEK

SEQ ID NO: 22384 - protein, 11 aa, Homo sapiens
  AACR GENIE Results; BRAF_p.V600E; B2702
KIGDFGLATEK

SEQ ID NO: 22385 - protein, 9 aa, Homo sapiens
  AACR GENIE Results; BRCA1_p.D1546N; B4001
LEESGPHNL

SEQ ID NO: 22386 - protein, 10 aa, Homo sapiens
  AACR GENIE Results; BRCA1_p.D1546N; B3501
GPHNLTETSY

SEQ ID NO: 22387 - protein, 9 aa, Homo sapiens
  AACR GENIE Results; BRCA1_p.E453D; A1101
SVDSNIEDK

SEQ ID NO: 22388 - protein, 9 aa, Homo sapiens
  AACR GENIE Results; BRCA1_p.E597K; A1101
SSISNMELK

SEQ ID NO: 22389 - protein, 9 aa, Homo sapiens
  AACR GENIE Results; BRCA1_p.K1606E; B1302
ALKVPQLEV

SEQ ID NO: 22390 - protein, 9 aa, Homo sapiens
  AACR GENIE Results; BRCA1_p.K1606E; A3001
ALKVPQLEV

SEQ ID NO: 22391 - protein, 9 aa, Homo sapiens
  AACR GENIE Results; BRCA1_p.K1606E; B1501
ALKVPQLEV

SEQ ID NO: 22392 - protein, 9 aa, Homo sapiens
  AACR GENIE Results; BRCA1_p.K1606E; A0201
ALKVPQLEV

SEQ ID NO: 22393 - protein, 9 aa, Homo sapiens
  AACR GENIE Results; BRCA2_p.S445Y; A2402
NYLPRISSL

SEQ ID NO: 22394 - protein, 9 aa, Homo sapiens
  AACR GENIE Results; BRCA2_p.S445Y; A2301
NYLPRISSL

SEQ ID NO: 22395 - protein, 10 aa, Homo sapiens
  AACR GENIE Results; BRCA2_p.S445Y; B1402
ENYLPRISSL

SEQ ID NO: 22396 - protein, 8 aa, Homo sapiens
  AACR GENIE Results; BRCA2_p.V3091I; C1701
GLAPFIYL

SEQ ID NO: 22397 - protein, 9 aa, Homo sapiens
  AACR GENIE Results; BRIP1_p.L892I; B1302
HQKVINVSI

SEQ ID NO: 22398 - protein, 9 aa, Homo sapiens
  AACR GENIE Results; BRIP1_p.L892I; B1501
HQKVINVSI

SEQ ID NO: 22399 - protein, 9 aa, Homo sapiens
  AACR GENIE Results; BRIP1_p.L892I; B0801
HQKVINVSI

SEQ ID NO: 22400 - protein, 10 aa, Homo sapiens
  AACR GENIE Results; BRIP1_p.L892I; A3101
KVINVSIKDR

SEQ ID NO: 22401 - protein, 9 aa, Homo sapiens
  AACR GENIE Results; BRIP1_p.L892I; A3001
HQKVINVSI

SEQ ID NO: 22402 - protein, 9 aa, Homo sapiens
  AACR GENIE Results; BUB1B_p.R555Q; B1501
AQQRPLAVL

SEQ ID NO: 22403 - protein, 10 aa, Homo sapiens
  AACR GENIE Results; BUB1B_p.R555Q; A1101
AQQRPLAVLK

SEQ ID NO: 22404 - protein, 9 aa, Homo sapiens
  AACR GENIE Results; BUB1B_p.R555Q; A3001
QQRPLAVLK

SEQ ID NO: 22405 - protein, 9 aa, Homo sapiens
  AACR GENIE Results; BUB1B_p.R555Q; C1502
LAQQRPLAV

SEQ ID NO: 22406 - protein, 8 aa, Homo sapiens
  AACR GENIE Results; BUB1B_p.R555Q; B1302
AQQRPLAV

SEQ ID NO: 22407 - protein, 9 aa, Homo sapiens
  AACR GENIE Results; BUB1B_p.R555Q; C1601
LAQQRPLAV

SEQ ID NO: 22408 - protein, 9 aa, Homo sapiens
  AACR GENIE Results; BUB1B_p.R555Q; A3101
QQRPLAVLK

SEQ ID NO: 22409 - protein, 9 aa, Homo sapiens
  AACR GENIE Results; BUB1B_p.R555Q; B0801
LAQQRPLAV

SEQ ID NO: 22410 - protein, 9 aa, Homo sapiens
  AACR GENIE Results; BUB1B_p.R555Q; B1302
AQQRPLAVL

SEQ ID NO: 22411 - protein, 9 aa, Homo sapiens
  AACR GENIE Results; BUB1B_p.R555Q; A0301
QQRPLAVLK

SEQ ID NO: 22412 - protein, 8 aa, Homo sapiens
  AACR GENIE Results; BUB1B_p.R555Q; B1501
QQRPLAVL

SEQ ID NO: 22413 - protein, 9 aa, Homo sapiens
  AACR GENIE Results; BUB1B_p.R555Q; B3901
AQQRPLAVL

SEQ ID NO: 22414 - protein, 9 aa, Homo sapiens
  AACR GENIE Results; BUB1B_p.R555Q; C1203
LAQQRPLAV

SEQ ID NO: 22415 - protein, 9 aa, Homo sapiens
  AACR GENIE Results; BUB1B_p.R555Q; A1101
QQRPLAVLK

SEQ ID NO: 22416 - protein, 9 aa, Homo sapiens
  AACR GENIE Results; CARD11_p.G540R; B5701
RSLPITNSF

SEQ ID NO: 22417 - protein, 9 aa, Homo sapiens
  AACR GENIE Results; CARD11_p.G540R; C0102
ASPSSCRSL

SEQ ID NO: 22418 - protein, 9 aa, Homo sapiens
  AACR GENIE Results; CARD11_p.G540R; A3201
RSLPITNSF

SEQ ID NO: 22419 - protein, 9 aa, Homo sapiens
  AACR GENIE Results; CARD11_p.G540R; A2301
RSLPITNSF

SEQ ID NO: 22420 - protein, 9 aa, Homo sapiens
  AACR GENIE Results; CARD11_p.G540R; B1501
RSLPITNSF

SEQ ID NO: 22421 - protein, 11 aa, Homo sapiens
  AACR GENIE Results; CARD11_p.G540R; A1101
RSLPITNSFTK

SEQ ID NO: 22422 - protein, 11 aa, Homo sapiens
  AACR GENIE Results; CARD11_p.G540R; B5701
RSLPITNSFTK

SEQ ID NO: 22423 - protein, 9 aa, Homo sapiens
  AACR GENIE Results; CARD11_p.G540R; A2402
RSLPITNSF

SEQ ID NO: 22424 - protein, 9 aa, Homo sapiens
  AACR GENIE Results; CASP8_p.R68Q; C1402
LFQINRLDL

SEQ ID NO: 22425 - protein, 9 aa, Homo sapiens
  AACR GENIE Results; CASP8_p.R68Q; C1701
FQINRLDLL

SEQ ID NO: 22426 - protein, 9 aa, Homo sapiens
  AACR GENIE Results; CASP8_p.R68Q; A0201
FQINRLDLL

SEQ ID NO: 22427 - protein, 9 aa, Homo sapiens
  AACR GENIE Results; CASP8_p.R68Q; A0201
FLKELLFQI

SEQ ID NO: 22428 - protein, 9 aa, Homo sapiens
  AACR GENIE Results; CASP8_p.R68Q; C0202
FQINRLDLL

SEQ ID NO: 22429 - protein, 9 aa, Homo sapiens
  AACR GENIE Results; CASP8_p.R68Q; A6802
ELLFQINRL

SEQ ID NO: 22430 - protein, 9 aa, Homo sapiens
  AACR GENIE Results; CASP8_p.R68Q; A6802
FQINRLDLL

SEQ ID NO: 22431 - protein, 8 aa, Homo sapiens
  AACR GENIE Results; CBL_p.P510A; C0304
VASSASAL

SEQ ID NO: 22432 - protein, 8 aa, Homo sapiens
  AACR GENIE Results; CBL_p.P510A; C0303
VASSASAL

SEQ ID NO: 22433 - protein, 9 aa, Homo sapiens
  AACR GENIE Results; CBL_p.P510A; B0702
CVASSASAL

SEQ ID NO: 22434 - protein, 9 aa, Homo sapiens
  AACR GENIE Results; CBL_p.P510A; C0304
CVASSASAL

SEQ ID NO: 22435 - protein, 9 aa, Homo sapiens
  AACR GENIE Results; CBL_p.P510A; B1501
CVASSASAL

SEQ ID NO: 22436 - protein, 9 aa, Homo sapiens
  AACR GENIE Results; CBL_p.P510A; C0303
CVASSASAL

SEQ ID NO: 22437 - protein, 8 aa, Homo sapiens
  AACR GENIE Results; CBL_p.P510A; B1501
VASSASAL

SEQ ID NO: 22438 - protein, 8 aa, Homo sapiens
  AACR GENIE Results; CBL_p.P510A; C0102
VASSASAL

SEQ ID NO: 22439 - protein, 9 aa, Homo sapiens
  AACR GENIE Results; CBL_p.P510A; A0201
LLPQRVCVA

SEQ ID NO: 22440 - protein, 9 aa, Homo sapiens
  AACR GENIE Results; CBL_p.P510A; C0102
CVASSASAL

SEQ ID NO: 22441 - protein, 9 aa, Homo sapiens
  AACR GENIE Results; CCND2_p.A252V; B1801
IEVVLLNSL

SEQ ID NO: 22442 - protein, 9 aa, Homo sapiens
  AACR GENIE Results; CCND2_p.A252V; B4001
IEVVLLNSL

SEQ ID NO: 22443 - protein, 11 aa, Homo sapiens
  AACR GENIE Results; CCND2_p.A252V; A2601
EVVLLNSLQQY

SEQ ID NO: 22444 - protein, 9 aa, Homo sapiens
  AACR GENIE Results; CCND2_p.A252V; B4901
IEVVLLNSL

SEQ ID NO: 22445 - protein, 9 aa, Homo sapiens
  AACR GENIE Results; CCND2_p.A252V; B4001
QEQIEVVLL

SEQ ID NO: 22446 - protein, 9 aa, Homo sapiens
  AACR GENIE Results; CCND2_p.A252V; A3001
IEVVLLNSL

SEQ ID NO: 22447 - protein, 9 aa, Homo sapiens
  AACR GENIE Results; CCND2_p.A252V; B1402
IEVVLLNSL

SEQ ID NO: 22448 - protein, 8 aa, Homo sapiens
  AACR GENIE Results; CCND2_p.A252V; B4001
QEQIEVVL

SEQ ID NO: 22449 - protein, 10 aa, Homo sapiens
  AACR GENIE Results; CCND2_p.A252V; B1501
VVLLNSLQQY

SEQ ID NO: 22450 - protein, 9 aa, Homo sapiens
  AACR GENIE Results; CCND2_p.A252V; B3801
CQEQIEVVL

SEQ ID NO: 22451 - protein, 9 aa, Homo sapiens
  AACR GENIE Results; CCND2_p.A252V; A2301
IEVVLLNSL

SEQ ID NO: 22452 - protein, 11 aa, Homo sapiens
  AACR GENIE Results; CCND2_p.A252V; B3501
EVVLLNSLQQY

SEQ ID NO: 22453 - protein, 11 aa, Homo sapiens
  AACR GENIE Results; CCND2_p.A252V; A6801
EVVLLNSLQQY

SEQ ID NO: 22454 - protein, 9 aa, Homo sapiens
  AACR GENIE Results; CCND2_p.A252V; B4403
IEVVLLNSL

SEQ ID NO: 22455 - protein, 11 aa, Homo sapiens
  AACR GENIE Results; CCND2_p.A252V; A3101
VVLLNSLQQYR

SEQ ID NO: 22456 - protein, 10 aa, Homo sapiens
  AACR GENIE Results; CCND2_p.A252V; A2902
VVLLNSLQQY

SEQ ID NO: 22457 - protein, 11 aa, Homo sapiens
  AACR GENIE Results; CCND2_p.A252V; B3801
EQIEVVLLNSL

SEQ ID NO: 22458 - protein, 9 aa, Homo sapiens
  AACR GENIE Results; CCND2_p.A252V; B4403
QEQIEVVLL

SEQ ID NO: 22459 - protein, 9 aa, Homo sapiens
  AACR GENIE Results; CCND2_p.A252V; B5101
IEVVLLNSL

SEQ ID NO: 22460 - protein, 9 aa, Homo sapiens
  AACR GENIE Results; CCND2_p.A252V; A3001
QEQIEVVLL

SEQ ID NO: 22461 - protein, 8 aa, Homo sapiens
  AACR GENIE Results; CCND2_p.A252V; A2601
EVVLLNSL

SEQ ID NO: 22462 - protein, 8 aa, Homo sapiens
  AACR GENIE Results; CCND2_p.A252V; B1402
EVVLLNSL

SEQ ID NO: 22463 - protein, 9 aa, Homo sapiens
  AACR GENIE Results; CCND2_p.A252V; B4901
QEQIEVVLL

SEQ ID NO: 22464 - protein, 8 aa, Homo sapiens
  AACR GENIE Results; CCND2_p.A252V; B0801
EVVLLNSL

SEQ ID NO: 22465 - protein, 9 aa, Homo sapiens
  AACR GENIE Results; CCND2_p.A252V; B1501
IEVVLLNSL

SEQ ID NO: 22466 - protein, 9 aa, Homo sapiens
  AACR GENIE Results; CCND2_p.A252V; B4402
QEQIEVVLL

SEQ ID NO: 22467 - protein, 8 aa, Homo sapiens
  AACR GENIE Results; CCND2_p.A252V; B5101
EVVLLNSL

SEQ ID NO: 22468 - protein, 9 aa, Homo sapiens
  AACR GENIE Results; CCND2_p.A252V; B3801
IEVVLLNSL

SEQ ID NO: 22469 - protein, 9 aa, Homo sapiens
  AACR GENIE Results; CCND2_p.A252V; B0702
IEVVLLNSL

SEQ ID NO: 22470 - protein, 8 aa, Homo sapiens
  AACR GENIE Results; CCND2_p.A252V; B1801
QEQIEVVL

SEQ ID NO: 22471 - protein, 9 aa, Homo sapiens
  AACR GENIE Results; CCND2_p.A252V; B4402
IEVVLLNSL

SEQ ID NO: 22472 - protein, 9 aa, Homo sapiens
  AACR GENIE Results; CCND2_p.A252V; A0201
ACQEQIEVV

SEQ ID NO: 22473 - protein, 9 aa, Homo sapiens
  AACR GENIE Results; CCND2_p.A252V; B1302
KACQEQIEV

SEQ ID NO: 22474 - protein, 8 aa, Homo sapiens
  AACR GENIE Results; CCND2_p.A252V; B1501
EQIEVVLL

SEQ ID NO: 22475 - protein, 11 aa, Homo sapiens
  AACR GENIE Results; CCND2_p.A252V; B1501
EVVLLNSLQQY

SEQ ID NO: 22476 - protein, 9 aa, Homo sapiens
  AACR GENIE Results; CCND2_p.A252V; C1601
KACQEQIEV

SEQ ID NO: 22477 - protein, 10 aa, Homo sapiens
  AACR GENIE Results; CCND2_p.A252V; A3001
ACQEQIEVVL

SEQ ID NO: 22478 - protein, 9 aa, Homo sapiens
  AACR GENIE Results; CCND2_p.A252V; B3801
QEQIEVVLL

SEQ ID NO: 22479 - protein, 11 aa, Homo sapiens
  AACR GENIE Results; CCND2_p.A252V; B4403
EVVLLNSLQQY

SEQ ID NO: 22480 - protein, 10 aa, Homo sapiens
  AACR GENIE Results; CCND2_p.A252V; B5701
VVLLNSLQQY

SEQ ID NO: 22481 - protein, 9 aa, Homo sapiens
  AACR GENIE Results; CCND2_p.A252V; B1302
IEVVLLNSL

SEQ ID NO: 22482 - protein, 8 aa, Homo sapiens
  AACR GENIE Results; CCND2_p.A252V; B1302
EQIEVVLL

SEQ ID NO: 22483 - protein, 10 aa, Homo sapiens
  AACR GENIE Results; CCND2_p.A252V; B4001
QIEVVLLNSL

SEQ ID NO: 22484 - protein, 9 aa, Homo sapiens
  AACR GENIE Results; CCND2_p.A252V; C1502
KACQEQIEV

SEQ ID NO: 22485 - protein, 9 aa, Homo sapiens
  AACR GENIE Results; CCND2_p.A252V; B1501
CQEQIEVVL

SEQ ID NO: 22486 - protein, 9 aa, Homo sapiens
  AACR GENIE Results; CCND2_p.A252V; B2705
IEVVLLNSL

SEQ ID NO: 22487 - protein, 8 aa, Homo sapiens
  AACR GENIE Results; CCND2_p.A252V; A3001
QEQIEVVL

SEQ ID NO: 22488 - protein, 10 aa, Homo sapiens
  AACR GENIE Results; CCND2_p.A252V; B3501
VVLLNSLQQY

SEQ ID NO: 22489 - protein, 11 aa, Homo sapiens
  AACR GENIE Results; CCND2_p.A252V; A3001
EQIEVVLLNSL

SEQ ID NO: 22490 - protein, 11 aa, Homo sapiens
  AACR GENIE Results; CCND2_p.A252V; B1302
EQIEVVLLNSL

SEQ ID NO: 22491 - protein, 9 aa, Homo sapiens
  AACR GENIE Results; CCND2_p.A252V; B3501
IEVVLLNSL

SEQ ID NO: 22492 - protein, 10 aa, Homo sapiens
  AACR GENIE Results; CCND2_p.A252V; B3801
QIEVVLLNSL

SEQ ID NO: 22493 - protein, 8 aa, Homo sapiens
  AACR GENIE Results; CCND2_p.A252V; B1801
EVVLLNSL

SEQ ID NO: 22494 - protein, 9 aa, Homo sapiens
  AACR GENIE Results; CCND2_p.A252V; C0802
CQEQIEVVL

SEQ ID NO: 22495 - protein, 10 aa, Homo sapiens
  AACR GENIE Results; CCNE1_p.F172L; A0101
YLAQDLFDRY

SEQ ID NO: 22496 - protein, 10 aa, Homo sapiens
  AACR GENIE Results; CCNE1_p.F172L; A2902
YLAQDLFDRY

SEQ ID NO: 22497 - protein, 9 aa, Homo sapiens
  AACR GENIE Results; CCNE1_p.F172L; B2702
YLAQDLFDR

SEQ ID NO: 22498 - protein, 11 aa, Homo sapiens
  AACR GENIE Results; CCNE1_p.F172L; A2902
FYLAQDLFDRY

SEQ ID NO: 22499 - protein, 9 aa, Homo sapiens
  AACR GENIE Results; CCNE1_p.F172L; B3501
LAQDLFDRY

SEQ ID NO: 22500 - protein, 9 aa, Homo sapiens
  AACR GENIE Results; CCNE1_p.F172L; B5701
LAQDLFDRY

SEQ ID NO: 22501 - protein, 9 aa, Homo sapiens
  AACR GENIE Results; CCNE1_p.F172L; A0101
LAQDLFDRY

SEQ ID NO: 22502 - protein, 9 aa, Homo sapiens
  AACR GENIE Results; CCNE1_p.F172L; A2902
LAQDLFDRY

SEQ ID NO: 22503 - protein, 8 aa, Homo sapiens
  AACR GENIE Results; CCNE1_p.F172L; A1101
AQDLFDRY

SEQ ID NO: 22504 - protein, 8 aa, Homo sapiens
  AACR GENIE Results; CDC73_p.R139Q; B4901
AEAKKPQI

SEQ ID NO: 22505 - protein, 8 aa, Homo sapiens
  AACR GENIE Results; CDC73_p.R139Q; B4002
AEAKKPQI

SEQ ID NO: 22506 - protein, 8 aa, Homo sapiens
  AACR GENIE Results; CDC73_p.R139Q; B4403
AEAKKPQI

SEQ ID NO: 22507 - protein, 8 aa, Homo sapiens
  AACR GENIE Results; CDC73_p.R91Q; B1501
DQKDLLGY

SEQ ID NO: 22508 - protein, 8 aa, Homo sapiens
  AACR GENIE Results; CDC73_p.R91Q; B0702
RPDQKDLL

SEQ ID NO: 22509 - protein, 10 aa, Homo sapiens
  AACR GENIE Results; CDK4_p.R24L; A0201
ALDPHSGHFV

SEQ ID NO: 22510 - protein, 9 aa, Homo sapiens
  AACR GENIE Results; CDK4_p.R24L; C0501
ALDPHSGHF

SEQ ID NO: 22511 - protein, 10 aa, Homo sapiens
  AACR GENIE Results; CDK4_p.R24L; B1302
ALDPHSGHFV

SEQ ID NO: 22512 - protein, 9 aa, Homo sapiens
  AACR GENIE Results; CDK4_p.R24L; C0802
ALDPHSGHF

SEQ ID NO: 22513 - protein, 10 aa, Homo sapiens
  AACR GENIE Results; CDK4_p.R24L; B5701
KALDPHSGHF

SEQ ID NO: 22514 - protein, 9 aa, Homo sapiens
  AACR GENIE Results; CDK4_p.R24L; B3801
ALDPHSGHF

SEQ ID NO: 22515 - protein, 11 aa, Homo sapiens
  AACR GENIE Results; CDK4_p.R24L; A0201
ALDPHSGHFVA

SEQ ID NO: 22516 - protein, 9 aa, Homo sapiens
  AACR GENIE Results; CDK4_p.R24L; A2301
AYGTVYKAL

SEQ ID NO: 22517 - protein, 9 aa, Homo sapiens
  AACR GENIE Results; CDK4_p.R24L; A0101
ALDPHSGHF

SEQ ID NO: 22518 - protein, 9 aa, Homo sapiens
  AACR GENIE Results; CDK4_p.R24L; A2402
AYGTVYKAL

SEQ ID NO: 22519 - protein, 9 aa, Homo sapiens
  AACR GENIE Results; CDK4_p.R24L; B1501
ALDPHSGHF

SEQ ID NO: 22520 - protein, 10 aa, Homo sapiens
  AACR GENIE Results; CDK4_p.R24L; C0501
ALDPHSGHFV

SEQ ID NO: 22521 - protein, 10 aa, Homo sapiens
  AACR GENIE Results; CDK4_p.R24L; C0304
KALDPHSGHF

SEQ ID NO: 22522 - protein, 10 aa, Homo sapiens
  AACR GENIE Results; CDK4_p.R24L; A0301
ALDPHSGHFV

SEQ ID NO: 22523 - protein, 10 aa, Homo sapiens
  AACR GENIE Results; CDK4_p.R24L; A0301
KALDPHSGHF

SEQ ID NO: 22524 - protein, 10 aa, Homo sapiens
  AACR GENIE Results; CDKN1B_p.S10Afs*32; B0702
SPRPAGTSSA

SEQ ID NO: 22525 - protein, 9 aa, Homo sapiens
  AACR GENIE Results; CDKN1B_p.S10Afs*32; B0702
SPRPAGTSS

SEQ ID NO: 22526 - protein, 10 aa, Homo sapiens
  AACR GENIE Results; CDKN1B_p.S10Afs*32; A1101
GTSSARWTTK

SEQ ID NO: 22527 - protein, 10 aa, Homo sapiens
  AACR GENIE Results; CDKN1B_p.S10Afs*32; A0301
GTSSARWTTK

SEQ ID NO: 22528 - protein, 10 aa, Homo sapiens
  AACR GENIE Results; CDKN2A_p.A102E; B4403
GERLDVRDAW

SEQ ID NO: 22529 - protein, 9 aa, Homo sapiens
  AACR GENIE Results; CDKN2A_p.A102E; C0602
HRAGERLDV

SEQ ID NO: 22530 - protein, 10 aa, Homo sapiens
  AACR GENIE Results; CDKN2A_p.A102E; B4402
GERLDVRDAW

SEQ ID NO: 22531 - protein, 9 aa, Homo sapiens
  AACR GENIE Results; CDKN2A_p.A102V; C0602
HRAGVRLDV

SEQ ID NO: 22532 - protein, 8 aa, Homo sapiens
  AACR GENIE Results; CDKN2A_p.A102V; C1601
RAGVRLDV

SEQ ID NO: 22533 - protein, 9 aa, Homo sapiens
  AACR GENIE Results; CDKN2A_p.A76Pfs*70; C0102
LSPDPCTTL

SEQ ID NO: 22534 - protein, 8 aa, Homo sapiens
  AACR GENIE Results; CDKN2A_p.A76Pfs*70; A1101
PEAVTMPA

SEQ ID NO: 22535 - protein, 11 aa, Homo sapiens
  AACR GENIE Results; CDKN2A_p.A76Pfs*70; B1501
RLRGAPEAVTM

SEQ ID NO: 22536 - protein, 9 aa, Homo sapiens
  AACR GENIE Results; CDKN2A_p.A76Pfs*70; B1501
RGAPEAVTM

SEQ ID NO: 22537 - protein, 9 aa, Homo sapiens
  AACR GENIE Results; CDKN2A_p.A76Pfs*70; A0301
RSWAIAMSH

SEQ ID NO: 22538 - protein, 9 aa, Homo sapiens
  AACR GENIE Results; CDKN2A_p.A76Pfs*70; B0702
IAMSHGTCA

SEQ ID NO: 22539 - protein, 9 aa, Homo sapiens
  AACR GENIE Results; CDKN2A_p.A76Pfs*70; B3501
RGAPEAVTM

SEQ ID NO: 22540 - protein, 9 aa, Homo sapiens
  AACR GENIE Results; CDKN2A_p.A76Pfs*70; A0201
RLRGAPEAV

SEQ ID NO: 22541 - protein, 8 aa, Homo sapiens
  AACR GENIE Results; CDKN2A_p.A76Pfs*70; B5101
GAPEAVTM

SEQ ID NO: 22542 - protein, 9 aa, Homo sapiens
  AACR GENIE Results; CDKN2A_p.A76Pfs*70; B0702
APEAVTMPA

SEQ ID NO: 22543 - protein, 8 aa, Homo sapiens
  AACR GENIE Results; CDKN2A_p.A76Pfs*70; C0102
GAPEAVTM

SEQ ID NO: 22544 - protein, 9 aa, Homo sapiens
  AACR GENIE Results; CDKN2A_p.A76Pfs*70; B3501
APEAVTMPA

SEQ ID NO: 22545 - protein, 9 aa, Homo sapiens
  AACR GENIE Results; CDKN2A_p.A76Pfs*70; B0702
RGAPEAVTM

SEQ ID NO: 22546 - protein, 8 aa, Homo sapiens
  AACR GENIE Results; CDKN2A_p.A76Pfs*70; B3501
MPGAVCPW

SEQ ID NO: 22547 - protein, 10 aa, Homo sapiens
  AACR GENIE Results; CDKN2A_p.A76Pfs*70; A1101
GAPEAVTMPA

SEQ ID NO: 22548 - protein, 9 aa, Homo sapiens
  AACR GENIE Results; CDKN2A_p.A76Pfs*70; C0304
IAMSHGTCA

SEQ ID NO: 22549 - protein, 11 aa, Homo sapiens
  AACR GENIE Results; CDKN2A_p.A76Pfs*70; A1101
RGAPEAVTMPA

SEQ ID NO: 22550 - protein, 9 aa, Homo sapiens
  AACR GENIE Results; CDKN2A_p.D108H; B4403
ARLDVRHAW

SEQ ID NO: 22551 - protein, 9 aa, Homo sapiens
  AACR GENIE Results; CDKN2A_p.D108N; B4403
ARLDVRNAW

SEQ ID NO: 22552 - protein, 9 aa, Homo sapiens
  AACR GENIE Results; CDKN2A_p.D108Y; B1501
AGARLDVRY

SEQ ID NO: 22553 - protein, 9 aa, Homo sapiens
  AACR GENIE Results; CDKN2A_p.D74G; B0702
GPATLTRPV

SEQ ID NO: 22554 - protein, 9 aa, Homo sapiens
  AACR GENIE Results; CDKN2A_p.D74G; A1101
CAGPATLTR

SEQ ID NO: 22555 - protein, 9 aa, Homo sapiens
  AACR GENIE Results; CDKN2A_p.D74G; B0801
GPATLTRPV

SEQ ID NO: 22556 - protein, 9 aa, Homo sapiens
  AACR GENIE Results; CDKN2A_p.D74Y; B3501
HGAEPNCAY

SEQ ID NO: 22557 - protein, 9 aa, Homo sapiens
  AACR GENIE Results; CDKN2A_p.D74Y; B1501
HGAEPNCAY

SEQ ID NO: 22558 - protein, 9 aa, Homo sapiens
  AACR GENIE Results; CDKN2A_p.D74Y; B5101
YPATLTRPV

SEQ ID NO: 22559 - protein, 11 aa, Homo sapiens
  AACR GENIE Results; CDKN2A_p.D74Y; B4001
AEPNCAYPATL

SEQ ID NO: 22560 - protein, 9 aa, Homo sapiens
  AACR GENIE Results; CDKN2A_p.D74Y; A1101
CAYPATLTR

SEQ ID NO: 22561 - protein, 9 aa, Homo sapiens
  AACR GENIE Results; CDKN2A_p.D74Y; A0301
CAYPATLTR

SEQ ID NO: 22562 - protein, 9 aa, Homo sapiens
  AACR GENIE Results; CDKN2A_p.D74Y; B0702
YPATLTRPV

SEQ ID NO: 22563 - protein, 9 aa, Homo sapiens
  AACR GENIE Results; CDKN2A_p.D74Y; B0801
YPATLTRPV

SEQ ID NO: 22564 - protein, 9 aa, Homo sapiens
  AACR GENIE Results; CDKN2A_p.D74Y; B3501
YPATLTRPV

SEQ ID NO: 22565 - protein, 9 aa, Homo sapiens
  AACR GENIE Results; CDKN2A_p.D74Y; C1203
CAYPATLTR

SEQ ID NO: 22566 - protein, 11 aa, Homo sapiens
  AACR GENIE Results; CDKN2A_p.D84G; B0702
RPVHGAAREGF

SEQ ID NO: 22567 - protein, 11 aa, Homo sapiens
  AACR GENIE Results; CDKN2A_p.D84N; B0702
RPVHNAAREGF

SEQ ID NO: 22568 - protein, 9 aa, Homo sapiens
  AACR GENIE Results; CDKN2A_p.D84N; B0702
LTRPVHNAA

SEQ ID NO: 22569 - protein, 9 aa, Homo sapiens
  AACR GENIE Results; CDKN2A_p.D84V; C1502
ATLTRPVHV

SEQ ID NO: 22570 - protein, 9 aa, Homo sapiens
  AACR GENIE Results; CDKN2A_p.D84V; B3801
VHVAAREGF

SEQ ID NO: 22571 - protein, 10 aa, Homo sapiens
  AACR GENIE Results; CDKN2A_p.D84V; A3101
LTRPVHVAAR

SEQ ID NO: 22572 - protein, 9 aa, Homo sapiens
  AACR GENIE Results; CDKN2A_p.D84V; A0201
ATLTRPVHV

SEQ ID NO: 22573 - protein, 9 aa, Homo sapiens
  AACR GENIE Results; CDKN2A_p.D84V; A3001
LTRPVHVAA

SEQ ID NO: 22574 - protein, 8 aa, Homo sapiens
  AACR GENIE Results; CDKN2A_p.D84V; C1701
VAAREGFL

SEQ ID NO: 22575 - protein, 11 aa, Homo sapiens
  AACR GENIE Results; CDKN2A_p.D84V; A3101
ATLTRPVHVAA

SEQ ID NO: 22576 - protein, 9 aa, Homo sapiens
  AACR GENIE Results; CDKN2A_p.D84V; B2705
TRPVHVAAR

SEQ ID NO: 22577 - protein, 9 aa, Homo sapiens
  AACR GENIE Results; CDKN2A_p.D84V; B0702
LTRPVHVAA

SEQ ID NO: 22578 - protein, 9 aa, Homo sapiens
  AACR GENIE Results; CDKN2A_p.D84Y; C1601
ATLTRPVHY

SEQ ID NO: 22579 - protein, 9 aa, Homo sapiens
  AACR GENIE Results; CDKN2A_p.D84Y; A2902
ATLTRPVHY

SEQ ID NO: 22580 - protein, 9 aa, Homo sapiens
  AACR GENIE Results; CDKN2A_p.D84Y; B5701
ATLTRPVHY

SEQ ID NO: 22581 - protein, 9 aa, Homo sapiens
  AACR GENIE Results; CDKN2A_p.D84Y; A1101
ATLTRPVHY

SEQ ID NO: 22582 - protein, 9 aa, Homo sapiens
  AACR GENIE Results; CDKN2A_p.D84Y; A0301
ATLTRPVHY

SEQ ID NO: 22583 - protein, 10 aa, Homo sapiens
  AACR GENIE Results; CDKN2A_p.D84Y; A3101
LTRPVHYAAR

SEQ ID NO: 22584 - protein, 11 aa, Homo sapiens
  AACR GENIE Results; CDKN2A_p.D84Y; B1801
DPATLTRPVHY

SEQ ID NO: 22585 - protein, 11 aa, Homo sapiens
  AACR GENIE Results; CDKN2A_p.D84Y; B3501
DPATLTRPVHY

SEQ ID NO: 22586 - protein, 9 aa, Homo sapiens
  AACR GENIE Results; CDKN2A_p.D84Y; B1501
ATLTRPVHY

SEQ ID NO: 22587 - protein, 9 aa, Homo sapiens
  AACR GENIE Results; CDKN2A_p.D84Y; C1203
ATLTRPVHY

SEQ ID NO: 22588 - protein, 9 aa, Homo sapiens
  AACR GENIE Results; CDKN2A_p.D84Y; A3201
ATLTRPVHY

SEQ ID NO: 22589 - protein, 10 aa, Homo sapiens
  AACR GENIE Results; CDKN2A_p.E69G; A0201
LLLHGAGPNC

SEQ ID NO: 22590 - protein, 9 aa, Homo sapiens
  AACR GENIE Results; CDKN2A_p.G55C; B0801
MCSARVAEL

SEQ ID NO: 22591 - protein, 9 aa, Homo sapiens
  AACR GENIE Results; CDKN2A_p.G55C; B0702
MCSARVAEL

SEQ ID NO: 22592 - protein, 9 aa, Homo sapiens
  AACR GENIE Results; CDKN2A_p.G55V; B0702
MVSARVAEL

SEQ ID NO: 22593 - protein, 9 aa, Homo sapiens
  AACR GENIE Results; CDKN2A_p.G55V; B0801
MVSARVAEL

SEQ ID NO: 22594 - protein, 9 aa, Homo sapiens
  AACR GENIE Results; CDKN2A_p.G55V; C0304
MVSARVAEL

SEQ ID NO: 22595 - protein, 10 aa, Homo sapiens
  AACR GENIE Results; CDKN2A_p.G55V; B0801
MMVSARVAEL

SEQ ID NO: 22596 - protein, 9 aa, Homo sapiens
  AACR GENIE Results; CDKN2A_p.G55V; A0301
MVSARVAEL

SEQ ID NO: 22597 - protein, 8 aa, Homo sapiens
  AACR GENIE Results; CDKN2A_p.G55V; C0304
VSARVAEL

SEQ ID NO: 22598 - protein, 9 aa, Homo sapiens
  AACR GENIE Results; CDKN2A_p.G55V; A0201
MVSARVAEL

SEQ ID NO: 22599 - protein, 9 aa, Homo sapiens
  AACR GENIE Results; CDKN2A_p.G55V; A0201
VMMMVSARV

SEQ ID NO: 22600 - protein, 11 aa, Homo sapiens
  AACR GENIE Results; CDKN2A_p.H83D; B0702
RPVDDAAREGF

SEQ ID NO: 22601 - protein, 11 aa, Homo sapiens
  AACR GENIE Results; CDKN2A_p.H83D; B3501
RPVDDAAREGF

SEQ ID NO: 22602 - protein, 10 aa, Homo sapiens
  AACR GENIE Results; CDKN2A_p.H83R; A6801
DPATLTRPVR

SEQ ID NO: 22603 - protein, 9 aa, Homo sapiens
  AACR GENIE Results; CDKN2A_p.H83Y; C0401
VYDAAREGF

SEQ ID NO: 22604 - protein, 8 aa, Homo sapiens
  AACR GENIE Results; CDKN2A_p.H83Y; B3701
YDAAREGF

SEQ ID NO: 22605 - protein, 10 aa, Homo sapiens
  AACR GENIE Results; CDKN2A_p.H83Y; B3501
DPATLTRPVY

SEQ ID NO: 22606 - protein, 9 aa, Homo sapiens
  AACR GENIE Results; CDKN2A_p.H83Y; A2402
VYDAAREGF

SEQ ID NO: 22607 - protein, 8 aa, Homo sapiens
  AACR GENIE Results; CDKN2A_p.H83Y; C1601
ATLTRPVY

SEQ ID NO: 22608 - protein, 10 aa, Homo sapiens
  AACR GENIE Results; CDKN2A_p.H83Y; A2601
DPATLTRPVY

SEQ ID NO: 22609 - protein, 9 aa, Homo sapiens
  AACR GENIE Results; CDKN2A_p.H83Y; A2301
VYDAAREGF

SEQ ID NO: 22610 - protein, 9 aa, Homo sapiens
  AACR GENIE Results; CDKN2A_p.H83Y; A3001
LTRPVYDAA

SEQ ID NO: 22611 - protein, 10 aa, Homo sapiens
  AACR GENIE Results; CDKN2A_p.H83Y; B3508
DPATLTRPVY

SEQ ID NO: 22612 - protein, 9 aa, Homo sapiens
  AACR GENIE Results; CDKN2A_p.H83Y; A0205
LTRPVYDAA

SEQ ID NO: 22613 - protein, 10 aa, Homo sapiens
  AACR GENIE Results; CDKN2A_p.H83Y; A2501
DPATLTRPVY

SEQ ID NO: 22614 - protein, 10 aa, Homo sapiens
  AACR GENIE Results; CDKN2A_p.H83Y; C0401
VYDAAREGFL

SEQ ID NO: 22615 - protein, 10 aa, Homo sapiens
  AACR GENIE Results; CDKN2A_p.H83Y; A3101
LTRPVYDAAR

SEQ ID NO: 22616 - protein, 9 aa, Homo sapiens
  AACR GENIE Results; CDKN2A_p.H83Y; C1402
VYDAAREGF

SEQ ID NO: 22617 - protein, 9 aa, Homo sapiens
  AACR GENIE Results; CDKN2A_p.H83Y; C0302
LTRPVYDAA

SEQ ID NO: 22618 - protein, 9 aa, Homo sapiens
  AACR GENIE Results; CDKN2A_p.H83Y; C1601
PATLTRPVY

SEQ ID NO: 22619 - protein, 8 aa, Homo sapiens
  AACR GENIE Results; CDKN2A_p.H83Y; B3906
TRPVYDAA

SEQ ID NO: 22620 - protein, 8 aa, Homo sapiens
  AACR GENIE Results; CDKN2A_p.L104Cfs*11; B0702
GPSARGPG

SEQ ID NO: 22621 - protein, 11 aa, Homo sapiens
  AACR GENIE Results; CDKN2A_p.L16Pfs*9; A1101
SSMEPSADWPR

SEQ ID NO: 22622 - protein, 11 aa, Homo sapiens
  AACR GENIE Results; CDKN2A_p.L16Pfs*9; A6801
SSMEPSADWPR

SEQ ID NO: 22623 - protein, 11 aa, Homo sapiens
  AACR GENIE Results; CDKN2A_p.L16Pfs*9; B2702
SSMEPSADWPR

SEQ ID NO: 22624 - protein, 10 aa, Homo sapiens
  AACR GENIE Results; CDKN2A_p.L32_L37del; B5801
RALPNAPNSY

SEQ ID NO: 22625 - protein, 10 aa, Homo sapiens
  AACR GENIE Results; CDKN2A_p.L32_L37del; A3002
RALPNAPNSY

SEQ ID NO: 22626 - protein, 10 aa, Homo sapiens
  AACR GENIE Results; CDKN2A_p.L32_L37del; B5701
RALPNAPNSY

SEQ ID NO: 22627 - protein, 10 aa, Homo sapiens
  AACR GENIE Results; CDKN2A_p.L32_L37del; B1501
RALPNAPNSY

SEQ ID NO: 22628 - protein, 10 aa, Homo sapiens
  AACR GENIE Results; CDKN2A_p.L32_L37del; B3501
RALPNAPNSY

SEQ ID NO: 22629 - protein, 11 aa, Homo sapiens
  AACR GENIE Results; CDKN2A_p.L32_L37del; B3901
VRALPNAPNSY

SEQ ID NO: 22630 - protein, 9 aa, Homo sapiens
  AACR GENIE Results; CDKN2A_p.L32_L37del; B5001
EEVRALPNA

SEQ ID NO: 22631 - protein, 10 aa, Homo sapiens
  AACR GENIE Results; CDKN2A_p.L32_L37del; A2902
RALPNAPNSY

SEQ ID NO: 22632 - protein, 10 aa, Homo sapiens
  AACR GENIE Results; CDKN2A_p.L32_L37del; B3901
RALPNAPNSY

SEQ ID NO: 22633 - protein, 11 aa, Homo sapiens
  AACR GENIE Results; CDKN2A_p.L32_L37del; B2702
VRALPNAPNSY

SEQ ID NO: 22634 - protein, 10 aa, Homo sapiens
  AACR GENIE Results; CDKN2A_p.L32_L37del; C1601
RALPNAPNSY

SEQ ID NO: 22635 - protein, 10 aa, Homo sapiens
  AACR GENIE Results; CDKN2A_p.L32_L37del; B2702
RALPNAPNSY

SEQ ID NO: 22636 - protein, 10 aa, Homo sapiens
  AACR GENIE Results; CDKN2A_p.L32_L37del; A3201
RALPNAPNSY

SEQ ID NO: 22637 - protein, 10 aa, Homo sapiens
  AACR GENIE Results; CDKN2A_p.L32_L37del; A3303
EVRALPNAPN

SEQ ID NO: 22638 - protein, 9 aa, Homo sapiens
  AACR GENIE Results; CDKN2A_p.L32_L37del; B4002
EEVRALPNA

SEQ ID NO: 22639 - protein, 10 aa, Homo sapiens
  AACR GENIE Results; CDKN2A_p.L32_L37del; A2301
RALPNAPNSY

SEQ ID NO: 22640 - protein, 9 aa, Homo sapiens
  AACR GENIE Results; CDKN2A_p.L32_L37del; A3303
EVRALPNAP

SEQ ID NO: 22641 - protein, 10 aa, Homo sapiens
  AACR GENIE Results; CDKN2A_p.L32_L37del; C0202
RALPNAPNSY

SEQ ID NO: 22642 - protein, 11 aa, Homo sapiens
  AACR GENIE Results; CDKN2A_p.L32Q; A0201
ALQEAGALPNA

SEQ ID NO: 22643 - protein, 9 aa, Homo sapiens
  AACR GENIE Results; CDKN2A_p.L32Q; A3001
QEAGALPNA

SEQ ID NO: 22644 - protein, 10 aa, Homo sapiens
  AACR GENIE Results; CDKN2A_p.L32Q; A3001
QEAGALPNAP

SEQ ID NO: 22645 - protein, 9 aa, Homo sapiens
  AACR GENIE Results; CDKN2A_p.L32Q; B0702
RALQEAGAL

SEQ ID NO: 22646 - protein, 10 aa, Homo sapiens
  AACR GENIE Results; CDKN2A_p.L32Q; A0201
LQEAGALPNA

SEQ ID NO: 22647 - protein, 9 aa, Homo sapiens
  AACR GENIE Results; CDKN2A_p.L32Q; B4403
QEAGALPNA

SEQ ID NO: 22648 - protein, 9 aa, Homo sapiens
  AACR GENIE Results; CDKN2A_p.L62P; A0301
RVAEPLLLH

SEQ ID NO: 22649 - protein, 9 aa, Homo sapiens
  AACR GENIE Results; CDKN2A_p.L62P; A1101
RVAEPLLLH

SEQ ID NO: 22650 - protein, 9 aa, Homo sapiens
  AACR GENIE Results; CDKN2A_p.L62P; C0602
ARVAEPLLL

SEQ ID NO: 22651 - protein, 9 aa, Homo sapiens
  AACR GENIE Results; CDKN2A_p.L62P; B0702
SARVAEPLL

SEQ ID NO: 22652 - protein, 9 aa, Homo sapiens
  AACR GENIE Results; CDKN2A_p.L62P; C1203
SARVAEPLL

SEQ ID NO: 22653 - protein, 9 aa, Homo sapiens
  AACR GENIE Results; CDKN2A_p.L62P; B5101
SARVAEPLL

SEQ ID NO: 22654 - protein, 9 aa, Homo sapiens
  AACR GENIE Results; CDKN2A_p.L62P; A0201
MGSARVAEP

SEQ ID NO: 22655 - protein, 10 aa, Homo sapiens
  AACR GENIE Results; CDKN2A_p.L62P; A0301
RVAEPLLLHG

SEQ ID NO: 22656 - protein, 11 aa, Homo sapiens
  AACR GENIE Results; CDKN2A_p.L62P; A0301
MMGSARVAEPL

SEQ ID NO: 22657 - protein, 9 aa, Homo sapiens
  AACR GENIE Results; CDKN2A_p.L62P; B1501
RVAEPLLLH

SEQ ID NO: 22658 - protein, 9 aa, Homo sapiens
  AACR GENIE Results; CDKN2A_p.L62P; C0202
SARVAEPLL

SEQ ID NO: 22659 - protein, 9 aa, Homo sapiens
  AACR GENIE Results; CDKN2A_p.L62P; C0701
ARVAEPLLL

SEQ ID NO: 22660 - protein, 8 aa, Homo sapiens
  AACR GENIE Results; CDKN2A_p.L78Hfs*41; A3301
DPATHPTR

SEQ ID NO: 22661 - protein, 9 aa, Homo sapiens
  AACR GENIE Results; CDKN2A_p.L78Hfs*41; A6801
HAGGAAPGR

SEQ ID NO: 22662 - protein, 8 aa, Homo sapiens
  AACR GENIE Results; CDKN2A_p.L78Hfs*41; B5101
DPATHPTR

SEQ ID NO: 22663 - protein, 9 aa, Homo sapiens
  AACR GENIE Results; CDKN2A_p.L78Hfs*41; B0702
GAAPGRGAA

SEQ ID NO: 22664 - protein, 9 aa, Homo sapiens
  AACR GENIE Results; CDKN2A_p.L78Hfs*41; A0205
GGAAPGRGA

SEQ ID NO: 22665 - protein, 9 aa, Homo sapiens
  AACR GENIE Results; CDKN2A_p.L78Hfs*41; A3303
PATHPTRAR

SEQ ID NO: 22666 - protein, 8 aa, Homo sapiens
  AACR GENIE Results; CDKN2A_p.L78Hfs*41; A6801
DPATHPTR

SEQ ID NO: 22667 - protein, 8 aa, Homo sapiens
  AACR GENIE Results; CDKN2A_p.L78Hfs*41; A3303
DPATHPTR

SEQ ID NO: 22668 - protein, 9 aa, Homo sapiens
  AACR GENIE Results; CDKN2A_p.L78Hfs*41; B5101
DPATHPTRA

SEQ ID NO: 22669 - protein, 10 aa, Homo sapiens
  AACR GENIE Results; CDKN2A_p.L78Hfs*41; A0301
CLGPSARGPG

SEQ ID NO: 22670 - protein, 8 aa, Homo sapiens
  AACR GENIE Results; CDKN2A_p.L78Hfs*41; B3501
DPATHPTR

SEQ ID NO: 22671 - protein, 9 aa, Homo sapiens
  AACR GENIE Results; CDKN2A_p.L78Hfs*41; A3301
PATHPTRAR

SEQ ID NO: 22672 - protein, 9 aa, Homo sapiens
  AACR GENIE Results; CDKN2A_p.M53I; C0602
RRPIQVMIM

SEQ ID NO: 22673 - protein, 9 aa, Homo sapiens
  AACR GENIE Results; CDKN2A_p.M53I; C0702
RRPIQVMIM

SEQ ID NO: 22674 - protein, 9 aa, Homo sapiens
  AACR GENIE Results; CDKN2A_p.M53I; A3101
QVMIMGSAR

SEQ ID NO: 22675 - protein, 9 aa, Homo sapiens
  AACR GENIE Results; CDKN2A_p.M53I; C0701
RRPIQVMIM

SEQ ID NO: 22676 - protein, 9 aa, Homo sapiens
  AACR GENIE Results; CDKN2A_p.M53I; B1302
VMIMGSARV

SEQ ID NO: 22677 - protein, 9 aa, Homo sapiens
  AACR GENIE Results; CDKN2A_p.M53I; A6801
QVMIMGSAR

SEQ ID NO: 22678 - protein, 8 aa, Homo sapiens
  AACR GENIE Results; CDKN2A_p.M53I; B0702
RPIQVMIM

SEQ ID NO: 22679 - protein, 9 aa, Homo sapiens
  AACR GENIE Results; CDKN2A_p.M53I; B1302
IQVMIMGSA

SEQ ID NO: 22680 - protein, 10 aa, Homo sapiens
  AACR GENIE Results; CDKN2A_p.M54del; B5502
RPIQVMMGSA

SEQ ID NO: 22681 - protein, 10 aa, Homo sapiens
  AACR GENIE Results; CDKN2A_p.M54del; B5501
RPIQVMMGSA

SEQ ID NO: 22682 - protein, 8 aa, Homo sapiens
  AACR GENIE Results; CDKN2A_p.M54del; B3906
IQVMMGSA

SEQ ID NO: 22683 - protein, 9 aa, Homo sapiens
  AACR GENIE Results; CDKN2A_p.M54del; A0205
QVMMGSARV

SEQ ID NO: 22684 - protein, 9 aa, Homo sapiens
  AACR GENIE Results; CDKN2A_p.M54del; A0206
QVMMGSARV

SEQ ID NO: 22685 - protein, 11 aa, Homo sapiens
  AACR GENIE Results; CDKN2A_p.M54del; A0201
VMMGSARVAEL

SEQ ID NO: 22686 - protein, 9 aa, Homo sapiens
  AACR GENIE Results; CDKN2A_p.M54del; A6802
QVMMGSARV

SEQ ID NO: 22687 - protein, 9 aa, Homo sapiens
  AACR GENIE Results; CDKN2A_p.M54del; B1302
QVMMGSARV

SEQ ID NO: 22688 - protein, 8 aa, Homo sapiens
  AACR GENIE Results; CDKN2A_p.P114L; C0501
LVDLAEEL

SEQ ID NO: 22689 - protein, 9 aa, Homo sapiens
  AACR GENIE Results; CDKN2A_p.P114L; A0201
LLVDLAEEL

SEQ ID NO: 22690 - protein, 9 aa, Homo sapiens
  AACR GENIE Results; CDKN2A_p.P114L; C0602
VRDAWGRLL

SEQ ID NO: 22691 - protein, 8 aa, Homo sapiens
  AACR GENIE Results; CDKN2A_p.P114L; C0401
LVDLAEEL

SEQ ID NO: 22692 - protein, 9 aa, Homo sapiens
  AACR GENIE Results; CDKN2A_p.Q50H; C0602
RRPIHVMMM

SEQ ID NO: 22693 - protein, 9 aa, Homo sapiens
  AACR GENIE Results; CDKN2A_p.Q50H; C0701
RRPIHVMMM

SEQ ID NO: 22694 - protein, 8 aa, Homo sapiens
  AACR GENIE Results; CDKN2A_p.Q50H; C0602
GRRPIHVM

SEQ ID NO: 22695 - protein, 9 aa, Homo sapiens
  AACR GENIE Results; CDKN2A_p.Q50H; C0702
RRPIHVMMM

SEQ ID NO: 22696 - protein, 8 aa, Homo sapiens
  AACR GENIE Results; CDKN2A_p.Q50H; B0702
RPIHVMMM

SEQ ID NO: 22697 - protein, 9 aa, Homo sapiens
  AACR GENIE Results; CDKN2A_p.R131P; B5101
LPAAAGGTR

SEQ ID NO: 22698 - protein, 9 aa, Homo sapiens
  AACR GENIE Results; CDKN2A_p.R131P; A2601
DVARYLPAA

SEQ ID NO: 22699 - protein, 11 aa, Homo sapiens
  AACR GENIE Results; CDKN2A_p.R87P; B3501
DAAPEGFLDTL

SEQ ID NO: 22700 - protein, 10 aa, Homo sapiens
  AACR GENIE Results; CDKN2A_p.R87P; C0102
AAPEGFLDTL

SEQ ID NO: 22701 - protein, 9 aa, Homo sapiens
  AACR GENIE Results; CDKN2A_p.R87P; B3501
APEGFLDTL

SEQ ID NO: 22702 - protein, 9 aa, Homo sapiens
  AACR GENIE Results; CDKN2A_p.R87P; B0702
APEGFLDTL

SEQ ID NO: 22703 - protein, 9 aa, Homo sapiens
  AACR GENIE Results; CDKN2A_p.T18_A19dup; A6801
LATATAAAR

SEQ ID NO: 22704 - protein, 9 aa, Homo sapiens
  AACR GENIE Results; CDKN2A_p.T18_A19dup; B2702
LATATAAAR

SEQ ID NO: 22705 - protein, 8 aa, Homo sapiens
  AACR GENIE Results; CDKN2A_p.T18_A19dup; B4002
ADWLATAT

SEQ ID NO: 22706 - protein, 9 aa, Homo sapiens
  AACR GENIE Results; CDKN2A_p.T18_A19dup; A0203
WLATATAAA

SEQ ID NO: 22707 - protein, 9 aa, Homo sapiens
  AACR GENIE Results; CDKN2A_p.T18_A19dup; B4002
ADWLATATA

SEQ ID NO: 22708 - protein, 9 aa, Homo sapiens
  AACR GENIE Results; CDKN2A_p.T18_A19dup; A6801
TATAAARGR

SEQ ID NO: 22709 - protein, 9 aa, Homo sapiens
  AACR GENIE Results; CDKN2A_p.T18_A19dup; B3906
ADWLATATA

SEQ ID NO: 22710 - protein, 9 aa, Homo sapiens
  AACR GENIE Results; CDKN2A_p.T18_A19dup; B3501
LATATAAAR

SEQ ID NO: 22711 - protein, 9 aa, Homo sapiens
  AACR GENIE Results; CDKN2A_p.T18_A19dup; B5001
ADWLATATA

SEQ ID NO: 22712 - protein, 10 aa, Homo sapiens
  AACR GENIE Results; CDKN2A_p.T18_A19dup; A1101
ATATAAARGR

SEQ ID NO: 22713 - protein, 10 aa, Homo sapiens
  AACR GENIE Results; CDKN2A_p.T18_A19dup; A6801
ATATAAARGR

SEQ ID NO: 22714 - protein, 9 aa, Homo sapiens
  AACR GENIE Results; CDKN2A_p.T18_A19dup; B3906
WLATATAAA

SEQ ID NO: 22715 - protein, 9 aa, Homo sapiens
  AACR GENIE Results; CHEK2_p.P484L; B4403
TEEALRHLW

SEQ ID NO: 22716 - protein, 9 aa, Homo sapiens
  AACR GENIE Results; CHEK2_p.P484L; B4402
TEEALRHLW

SEQ ID NO: 22717 - protein, 10 aa, Homo sapiens
  AACR GENIE Results; CHEK2_p.R519G; A0301
VLAQPSTSGK

SEQ ID NO: 22718 - protein, 11 aa, Homo sapiens
  AACR GENIE Results; CHEK2_p.R519G; A0301
QVLAQPSTSGK

SEQ ID NO: 22719 - protein, 10 aa, Homo sapiens
  AACR GENIE Results; CIITA_p.E26D; A1101
ATMDLGPLEG

SEQ ID NO: 22720 - protein, 9 aa, Homo sapiens
  AACR GENIE Results; CIITA_p.E26D; A2601
DLGPLEGGY

SEQ ID NO: 22721 - protein, 11 aa, Homo sapiens
  AACR GENIE Results; CIITA_p.E26D; A0101
TMDLGPLEGGY

SEQ ID NO: 22722 - protein, 10 aa, Homo sapiens
  AACR GENIE Results; CIITA_p.E26D; B2702
MDLGPLEGGY

SEQ ID NO: 22723 - protein, 10 aa, Homo sapiens
  AACR GENIE Results; CIITA_p.R548Q; B0702
QPRGRLVQSL

SEQ ID NO: 22724 - protein, 11 aa, Homo sapiens
  AACR GENIE Results; CIITA_p.R548Q; B1501
AQPRGRLVQSL

SEQ ID NO: 22725 - protein, 10 aa, Homo sapiens
  AACR GENIE Results; CREBBP_p.G1374V; A1101
KTVEVKPVMK

SEQ ID NO: 22726 - protein, 10 aa, Homo sapiens
  AACR GENIE Results; CREBBP_p.G1374V; A0301
KTVEVKPVMK

SEQ ID NO: 22727 - protein, 9 aa, Homo sapiens
  AACR GENIE Results; CREBBP_p.G1374V; B5701
KTVEVKPVM

SEQ ID NO: 22728 - protein, 9 aa, Homo sapiens
  AACR GENIE Results; CREBBP_p.G1374V; C1601
KTVEVKPVM

SEQ ID NO: 22729 - protein, 9 aa, Homo sapiens
  AACR GENIE Results; CREBBP_p.G1374V; A1101
TVEVKPVMK

SEQ ID NO: 22730 - protein, 10 aa, Homo sapiens
  AACR GENIE Results; CREBBP_p.G1374V; B5701
KTVEVKPVMK

SEQ ID NO: 22731 - protein, 10 aa, Homo sapiens
  AACR GENIE Results; CREBBP_p.G1374V; A6801
KTVEVKPVMK

SEQ ID NO: 22732 - protein, 9 aa, Homo sapiens
  AACR GENIE Results; CREBBP_p.G1374V; A3001
KTVEVKPVM

SEQ ID NO: 22733 - protein, 9 aa, Homo sapiens
  AACR GENIE Results; CREBBP_p.G1374V; B1501
KTVEVKPVM

SEQ ID NO: 22734 - protein, 9 aa, Homo sapiens
  AACR GENIE Results; CREBBP_p.G1374V; A6801
TVEVKPVMK

SEQ ID NO: 22735 - protein, 8 aa, Homo sapiens
  AACR GENIE Results; CREBBP_p.G1374V; B0801
TVEVKPVM

SEQ ID NO: 22736 - protein, 9 aa, Homo sapiens
  AACR GENIE Results; CREBBP_p.G1374V; B3501
KTVEVKPVM

SEQ ID NO: 22737 - protein, 9 aa, Homo sapiens
  AACR GENIE Results; CREBBP_p.G1374V; C0304
KTVEVKPVM

SEQ ID NO: 22738 - protein, 9 aa, Homo sapiens
  AACR GENIE Results; CREBBP_p.G1374V; C1203
KTVEVKPVM

SEQ ID NO: 22739 - protein, 10 aa, Homo sapiens
  AACR GENIE Results; CREBBP_p.G1374V; A3101
KTVEVKPVMK

SEQ ID NO: 22740 - protein, 9 aa, Homo sapiens
  AACR GENIE Results; CREBBP_p.G1374V; A6801
EVKPVMKSR

SEQ ID NO: 22741 - protein, 9 aa, Homo sapiens
  AACR GENIE Results; CREBBP_p.G1374V; B1302
KTVEVKPVM

SEQ ID NO: 22742 - protein, 9 aa, Homo sapiens
  AACR GENIE Results; CREBBP_p.G1374V; C1502
KTVEVKPVM

SEQ ID NO: 22743 - protein, 9 aa, Homo sapiens
  AACR GENIE Results; CREBBP_p.G1374V; A3201
KTVEVKPVM

SEQ ID NO: 22744 - protein, 9 aa, Homo sapiens
  AACR GENIE Results; CREBBP_p.G1374V; A0301
TVEVKPVMK

SEQ ID NO: 22745 - protein, 8 aa, Homo sapiens
  AACR GENIE Results; CREBBP_p.G1374V; A1101
VEVKPVMK

SEQ ID NO: 22746 - protein, 9 aa, Homo sapiens
  AACR GENIE Results; CREBBP_p.G1374V; B0702
KTVEVKPVM

SEQ ID NO: 22747 - protein, 9 aa, Homo sapiens
  AACR GENIE Results; CREBBP_p.G1374V; A2301
KTVEVKPVM

SEQ ID NO: 22748 - protein, 9 aa, Homo sapiens
  AACR GENIE Results; CREBBP_p.G1374V; A3101
EVKPVMKSR

SEQ ID NO: 22749 - protein, 9 aa, Homo sapiens
  AACR GENIE Results; CREBBP_p.G1374V; A0201
KTVEVKPVM

SEQ ID NO: 22750 - protein, 9 aa, Homo sapiens
  AACR GENIE Results; CREBBP_p.G1374V; C0701
KTVEVKPVM

SEQ ID NO: 22751 - protein, 10 aa, Homo sapiens
  AACR GENIE Results; CREBBP_p.G1404S; B4403
EEIDSVDVCF

SEQ ID NO: 22752 - protein, 10 aa, Homo sapiens
  AACR GENIE Results; CREBBP_p.G1404S; B4001
EEIDSVDVCF

SEQ ID NO: 22753 - protein, 10 aa, Homo sapiens
  AACR GENIE Results; CREBBP_p.G1404S; B4402
EEIDSVDVCF

SEQ ID NO: 22754 - protein, 10 aa, Homo sapiens
  AACR GENIE Results; CREBBP_p.G1404S; B1801
EEIDSVDVCF

SEQ ID NO: 22755 - protein, 9 aa, Homo sapiens
  AACR GENIE Results; CREBBP_p.G1404S; B4001
FEEIDSVDV

SEQ ID NO: 22756 - protein, 9 aa, Homo sapiens
  AACR GENIE Results; CREBBP_p.G1404S; B5101
FAFEEIDSV

SEQ ID NO: 22757 - protein, 9 aa, Homo sapiens
  AACR GENIE Results; CREBBP_p.G1404S; C1203
FAFEEIDSV

SEQ ID NO: 22758 - protein, 11 aa, Homo sapiens
  AACR GENIE Results; CREBBP_p.G1404S; A0201
ALFAFEEIDSV

SEQ ID NO: 22759 - protein, 9 aa, Homo sapiens
  AACR GENIE Results; CREBBP_p.G1404S; C0501
EIDSVDVCF

SEQ ID NO: 22760 - protein, 11 aa, Homo sapiens
  AACR GENIE Results; CREBBP_p.G1404S; B3501
FAFEEIDSVDV

SEQ ID NO: 22761 - protein, 9 aa, Homo sapiens
  AACR GENIE Results; CREBBP_p.G1404S; B3501
FAFEEIDSV

SEQ ID NO: 22762 - protein, 11 aa, Homo sapiens
  AACR GENIE Results; CREBBP_p.G1404S; B4403
EEIDSVDVCFF

SEQ ID NO: 22763 - protein, 9 aa, Homo sapiens
  AACR GENIE Results; CREBBP_p.G1404S; A0201
FAFEEIDSV

SEQ ID NO: 22764 - protein, 10 aa, Homo sapiens
  AACR GENIE Results; CREBBP_p.K1139T; A6801
NPMDLSTITR

SEQ ID NO: 22765 - protein, 11 aa, Homo sapiens
  AACR GENIE Results; CREBBP_p.K1139T; A6801
NPMDLSTITRK

SEQ ID NO: 22766 - protein, 10 aa, Homo sapiens
  AACR GENIE Results; CREBBP_p.K1139T; B3501
NPMDLSTITR

SEQ ID NO: 22767 - protein, 9 aa, Homo sapiens
  AACR GENIE Results; CREBBP_p.R742P; C0102
MGPPAASPM

SEQ ID NO: 22768 - protein, 11 aa, Homo sapiens
  AACR GENIE Results; CREBBP_p.R742P; B0702
APMGPPAASPM

SEQ ID NO: 22769 - protein, 11 aa, Homo sapiens
  AACR GENIE Results; CREBBP_p.R742P; B3501
APMGPPAASPM

SEQ ID NO: 22770 - protein, 10 aa, Homo sapiens
  AACR GENIE Results; CREBBP_p.R742P; B0702
APMGPPAASP

SEQ ID NO: 22771 - protein, 11 aa, Homo sapiens
  AACR GENIE Results; CREBBP_p.S1934P; A1101
TQPPTTVPTGK

SEQ ID NO: 22772 - protein, 9 aa, Homo sapiens
  AACR GENIE Results; CSF1R_p.A629S; C0501
HADEKESLM

SEQ ID NO: 22773 - protein, 9 aa, Homo sapiens
  AACR GENIE Results; CSF1R_p.A629S; B3502
HADEKESLM

SEQ ID NO: 22774 - protein, 9 aa, Homo sapiens
  AACR GENIE Results; CSF1R_p.A629S; C0802
HADEKESLM

SEQ ID NO: 22775 - protein, 9 aa, Homo sapiens
  AACR GENIE Results; CSF1R_p.A629S; B3801
AHADEKESL

SEQ ID NO: 22776 - protein, 9 aa, Homo sapiens
  AACR GENIE Results; CSF1R_p.A629S; B3503
HADEKESLM

SEQ ID NO: 22777 - protein, 8 aa, Homo sapiens
  AACR GENIE Results; CSF1R_p.A629S; C0802
HADEKESL

SEQ ID NO: 22778 - protein, 9 aa, Homo sapiens
  AACR GENIE Results; CSF1R_p.A629S; B3901
AHADEKESL

SEQ ID NO: 22779 - protein, 8 aa, Homo sapiens
  AACR GENIE Results; CSF1R_p.A629S; B3502
HADEKESL

SEQ ID NO: 22780 - protein, 8 aa, Homo sapiens
  AACR GENIE Results; CSF1R_p.A629S; C0501
HADEKESL

SEQ ID NO: 22781 - protein, 9 aa, Homo sapiens
  AACR GENIE Results; CSF1R_p.A629S; B3501
HADEKESLM

SEQ ID NO: 22782 - protein, 9 aa, Homo sapiens
  AACR GENIE Results; CSF1R_p.A629S; C0401
HADEKESLM

SEQ ID NO: 22783 - protein, 9 aa, Homo sapiens
  AACR GENIE Results; CSF1R_p.A629S; C0304
HADEKESLM

SEQ ID NO: 22784 - protein, 8 aa, Homo sapiens
  AACR GENIE Results; CSF1R_p.A629S; B3701
KESLMSEL

SEQ ID NO: 22785 - protein, 10 aa, Homo sapiens
  AACR GENIE Results; CSF1R_p.A629S; B3502
TAHADEKESL

SEQ ID NO: 22786 - protein, 10 aa, Homo sapiens
  AACR GENIE Results; CSF1R_p.A629S; B3801
AHADEKESLM

SEQ ID NO: 22787 - protein, 8 aa, Homo sapiens
  AACR GENIE Results; CSF1R_p.A629S; B4001
KESLMSEL

SEQ ID NO: 22788 - protein, 8 aa, Homo sapiens
  AACR GENIE Results; CSF1R_p.A629S; B3503
HADEKESL

SEQ ID NO: 22789 - protein, 10 aa, Homo sapiens
  AACR GENIE Results; CSF1R_p.A629S; B3503
TAHADEKESL

SEQ ID NO: 22790 - protein, 8 aa, Homo sapiens
  AACR GENIE Results; CSF1R_p.A629S; B4002
KESLMSEL

SEQ ID NO: 22791 - protein, 10 aa, Homo sapiens
  AACR GENIE Results; CSF1R_p.A629S; A3001
DEKESLMSEL

SEQ ID NO: 22792 - protein, 8 aa, Homo sapiens
  AACR GENIE Results; CSF1R_p.A629S; B0801
HADEKESL

SEQ ID NO: 22793 - protein, 10 aa, Homo sapiens
  AACR GENIE Results; CSF1R_p.A629S; B4002
DEKESLMSEL

SEQ ID NO: 22794 - protein, 9 aa, Homo sapiens
  AACR GENIE Results; CSF1R_p.A629S; C1701
HADEKESLM

SEQ ID NO: 22795 - protein, 10 aa, Homo sapiens
  AACR GENIE Results; CSF1R_p.A629S; B3901
AHADEKESLM

SEQ ID NO: 22796 - protein, 9 aa, Homo sapiens
  AACR GENIE Results; CSF1R_p.A629S; B3801
HADEKESLM

SEQ ID NO: 22797 - protein, 8 aa, Homo sapiens
  AACR GENIE Results; CSF1R_p.A629S; A3001
KESLMSEL

SEQ ID NO: 22798 - protein, 9 aa, Homo sapiens
  AACR GENIE Results; CSF1R_p.A629S; C0303
HADEKESLM

SEQ ID NO: 22799 - protein, 10 aa, Homo sapiens
  AACR GENIE Results; CSF1R_p.A629S; B1801
DEKESLMSEL

SEQ ID NO: 22800 - protein, 9 aa, Homo sapiens
  AACR GENIE Results; CSF1R_p.A629S; B5101
HADEKESLM

SEQ ID NO: 22801 - protein, 9 aa, Homo sapiens
  AACR GENIE Results; CSF1R_p.P455H; C0401
VWDDPYHEV

SEQ ID NO: 22802 - protein, 9 aa, Homo sapiens
  AACR GENIE Results; CSF1R_p.P455H; C0501
VWDDPYHEV

SEQ ID NO: 22803 - protein, 10 aa, Homo sapiens
  AACR GENIE Results; CSF1R_p.P455H; C0401
VWDDPYHEVL

SEQ ID NO: 22804 - protein, 8 aa, Homo sapiens
  AACR GENIE Results; CSF1R_p.P455H; B0801
DDPYHEVL

SEQ ID NO: 22805 - protein, 9 aa, Homo sapiens
  AACR GENIE Results; CSF1R_p.P455H; B1801
HEVLSQEPF

SEQ ID NO: 22806 - protein, 8 aa, Homo sapiens
  AACR GENIE Results; CSF1R_p.P455H; B5101
DDPYHEVL

SEQ ID NO: 22807 - protein, 10 aa, Homo sapiens
  AACR GENIE Results; CSF1R_p.P455H; A0201
QVWDDPYHEV

SEQ ID NO: 22808 - protein, 10 aa, Homo sapiens
  AACR GENIE Results; CSF1R_p.P455H; C0501
VWDDPYHEVL

SEQ ID NO: 22809 - protein, 9 aa, Homo sapiens
  AACR GENIE Results; CSF1R_p.P455H; B4001
HEVLSQEPF

SEQ ID NO: 22810 - protein, 11 aa, Homo sapiens
  AACR GENIE Results; CTCF_p.E14K; B4403
VEAIVEESKTF

SEQ ID NO: 22811 - protein, 9 aa, Homo sapiens
  AACR GENIE Results; CTCF_p.E14K; B1501
AIVEESKTF

SEQ ID NO: 22812 - protein, 11 aa, Homo sapiens
  AACR GENIE Results; CTCF_p.E14K; A1101
AIVEESKTFIK

SEQ ID NO: 22813 - protein, 11 aa, Homo sapiens
  AACR GENIE Results; CTCF_p.E14K; B4402
VEAIVEESKTF

SEQ ID NO: 22814 - protein, 9 aa, Homo sapiens
  AACR GENIE Results; CTCF_p.E14K; C0501
IVEESKTFI

SEQ ID NO: 22815 - protein, 10 aa, Homo sapiens
  AACR GENIE Results; CTCF_p.E14K; B3501
EAIVEESKTF

SEQ ID NO: 22816 - protein, 10 aa, Homo sapiens
  AACR GENIE Results; CTCF_p.E14K; A1101
IVEESKTFIK

SEQ ID NO: 22817 - protein, 10 aa, Homo sapiens
  AACR GENIE Results; CTCF_p.E14K; A0301
IVEESKTFIK

SEQ ID NO: 22818 - protein, 10 aa, Homo sapiens
  AACR GENIE Results; CTCF_p.E14K; A0201
AIVEESKTFI

SEQ ID NO: 22819 - protein, 11 aa, Homo sapiens
  AACR GENIE Results; CTCF_p.E14K; B1801
VEAIVEESKTF

SEQ ID NO: 22820 - protein, 9 aa, Homo sapiens
  AACR GENIE Results; CTCF_p.E14K; A0301
KTFIKGKER

SEQ ID NO: 22821 - protein, 10 aa, Homo sapiens
  AACR GENIE Results; CTCF_p.E14K; A2601
EAIVEESKTF

SEQ ID NO: 22822 - protein, 8 aa, Homo sapiens
  AACR GENIE Results; CTNNB1_p.D32G; B5101
QSYLGSGI

SEQ ID NO: 22823 - protein, 10 aa, Homo sapiens
  AACR GENIE Results; CTNNB1_p.D32G; A0201
YLGSGIHSGA

SEQ ID NO: 22824 - protein, 11 aa, Homo sapiens
  AACR GENIE Results; CTNNB1_p.D32G; A0201
YLGSGIHSGAT

SEQ ID NO: 22825 - protein, 9 aa, Homo sapiens
  AACR GENIE Results; CTNNB1_p.D32G; A6801
LGSGIHSGA

SEQ ID NO: 22826 - protein, 9 aa, Homo sapiens
  AACR GENIE Results; CTNNB1_p.D32G; A1101
QSYLGSGIH

SEQ ID NO: 22827 - protein, 9 aa, Homo sapiens
  AACR GENIE Results; CTNNB1_p.D32G; B0801
YLGSGIHSG

SEQ ID NO: 22828 - protein, 9 aa, Homo sapiens
  AACR GENIE Results; CTNNB1_p.D32G; B0801
LGSGIHSGA

SEQ ID NO: 22829 - protein, 9 aa, Homo sapiens
  AACR GENIE Results; CTNNB1_p.D32G; A0301
QSYLGSGIH

SEQ ID NO: 22830 - protein, 9 aa, Homo sapiens
  AACR GENIE Results; CTNNB1_p.D32G; A0201
YLGSGIHSG

SEQ ID NO: 22831 - protein, 10 aa, Homo sapiens
  AACR GENIE Results; CTNNB1_p.D32G; A1101
SYLGSGIHSG

SEQ ID NO: 22832 - protein, 10 aa, Homo sapiens
  AACR GENIE Results; CTNNB1_p.D32G; A0201
SYLGSGIHSG

SEQ ID NO: 22833 - protein, 10 aa, Homo sapiens
  AACR GENIE Results; CTNNB1_p.D32G; B0801
YLGSGIHSGA

SEQ ID NO: 22834 - protein, 11 aa, Homo sapiens
  AACR GENIE Results; CTNNB1_p.D32G; A6801
QSYLGSGIHSG

SEQ ID NO: 22835 - protein, 10 aa, Homo sapiens
  AACR GENIE Results; CTNNB1_p.D32N; A0201
YLNSGIHSGA

SEQ ID NO: 22836 - protein, 11 aa, Homo sapiens
  AACR GENIE Results; CTNNB1_p.D32N; A0201
YLNSGIHSGAT

SEQ ID NO: 22837 - protein, 8 aa, Homo sapiens
  AACR GENIE Results; CTNNB1_p.D32N; B5101
QSYLNSGI

SEQ ID NO: 22838 - protein, 9 aa, Homo sapiens
  AACR GENIE Results; CTNNB1_p.D32N; A0201
YLNSGIHSG

SEQ ID NO: 22839 - protein, 9 aa, Homo sapiens
  AACR GENIE Results; CTNNB1_p.D32N; A1101
QSYLNSGIH

SEQ ID NO: 22840 - protein, 9 aa, Homo sapiens
  AACR GENIE Results; CTNNB1_p.D32N; B0801
YLNSGIHSG

SEQ ID NO: 22841 - protein, 10 aa, Homo sapiens
  AACR GENIE Results; CTNNB1_p.D32N; B1501
YLNSGIHSGA

SEQ ID NO: 22842 - protein, 10 aa, Homo sapiens
  AACR GENIE Results; CTNNB1_p.D32N; B0801
YLNSGIHSGA

SEQ ID NO: 22843 - protein, 10 aa, Homo sapiens
  AACR GENIE Results; CTNNB1_p.D32N; A0301
YLNSGIHSGA

SEQ ID NO: 22844 - protein, 9 aa, Homo sapiens
  AACR GENIE Results; CTNNB1_p.D32N; A2601
YLNSGIHSG

SEQ ID NO: 22845 - protein, 9 aa, Homo sapiens
  AACR GENIE Results; CTNNB1_p.D32N; A0301
QSYLNSGIH

SEQ ID NO: 22846 - protein, 9 aa, Homo sapiens
  AACR GENIE Results; CTNNB1_p.D32N; A0301
YLNSGIHSG

SEQ ID NO: 22847 - protein, 9 aa, Homo sapiens
  AACR GENIE Results; CTNNB1_p.D32Y; A2902
HWQQQSYLY

SEQ ID NO: 22848 - protein, 10 aa, Homo sapiens
  AACR GENIE Results; CTNNB1_p.D32Y; A0201
YLYSGIHSGA

SEQ ID NO: 22849 - protein, 9 aa, Homo sapiens
  AACR GENIE Results; CTNNB1_p.D32Y; A0201
YLYSGIHSG

SEQ ID NO: 22850 - protein, 11 aa, Homo sapiens
  AACR GENIE Results; CTNNB1_p.D32Y; A0201
YLYSGIHSGAT

SEQ ID NO: 22851 - protein, 8 aa, Homo sapiens
  AACR GENIE Results; CTNNB1_p.D32Y; B1501
WQQQSYLY

SEQ ID NO: 22852 - protein, 10 aa, Homo sapiens
  AACR GENIE Results; CTNNB1_p.D32Y; A3101
SYLYSGIHSG

SEQ ID NO: 22853 - protein, 10 aa, Homo sapiens
  AACR GENIE Results; CTNNB1_p.D32Y; A0301
YLYSGIHSGA

SEQ ID NO: 22854 - protein, 9 aa, Homo sapiens
  AACR GENIE Results; CTNNB1_p.D32Y; B0801
YSGIHSGAT

SEQ ID NO: 22855 - protein, 9 aa, Homo sapiens
  AACR GENIE Results; CTNNB1_p.D32Y; A3101
LYSGIHSGA

SEQ ID NO: 22856 - protein, 9 aa, Homo sapiens
  AACR GENIE Results; CTNNB1_p.D32Y; A0301
YLYSGIHSG

SEQ ID NO: 22857 - protein, 11 aa, Homo sapiens
  AACR GENIE Results; CTNNB1_p.D32Y; B0801
YLYSGIHSGAT

SEQ ID NO: 22858 - protein, 10 aa, Homo sapiens
  AACR GENIE Results; CTNNB1_p.D32Y; B1501
YLYSGIHSGA

SEQ ID NO: 22859 - protein, 9 aa, Homo sapiens
  AACR GENIE Results; CTNNB1_p.D32Y; A3101
YLYSGIHSG

SEQ ID NO: 22860 - protein, 9 aa, Homo sapiens
  AACR GENIE Results; CTNNB1_p.D32Y; A2601
YLYSGIHSG

SEQ ID NO: 22861 - protein, 9 aa, Homo sapiens
  AACR GENIE Results; CTNNB1_p.D32Y; B0801
YLYSGIHSG

SEQ ID NO: 22862 - protein, 9 aa, Homo sapiens
  AACR GENIE Results; CTNNB1_p.D32Y; A3101
SYLYSGIHS

SEQ ID NO: 22863 - protein, 8 aa, Homo sapiens
  AACR GENIE Results; CTNNB1_p.D32Y; B5101
QSYLYSGI

SEQ ID NO: 22864 - protein, 11 aa, Homo sapiens
  AACR GENIE Results; CTNNB1_p.D32Y; A3101
YLYSGIHSGAT

SEQ ID NO: 22865 - protein, 8 aa, Homo sapiens
  AACR GENIE Results; CTNNB1_p.D32Y; B0801
YSGIHSGA

SEQ ID NO: 22866 - protein, 11 aa, Homo sapiens
  AACR GENIE Results; CTNNB1_p.D32Y; A3101
SYLYSGIHSGA

SEQ ID NO: 22867 - protein, 10 aa, Homo sapiens
  AACR GENIE Results; CTNNB1_p.D32Y; B0801
YLYSGIHSGA

SEQ ID NO: 22868 - protein, 8 aa, Homo sapiens
  AACR GENIE Results; CTNNB1_p.D32Y; C1203
YSGIHSGA

SEQ ID NO: 22869 - protein, 10 aa, Homo sapiens
  AACR GENIE Results; CTNNB1_p.D32Y; A0201
LYSGIHSGAT

SEQ ID NO: 22870 - protein, 10 aa, Homo sapiens
  AACR GENIE Results; CTNNB1_p.D32Y; A2902
YLYSGIHSGA

SEQ ID NO: 22871 - protein, 10 aa, Homo sapiens
  AACR GENIE Results; CTNNB1_p.G34E; A0201
YLDSEIHSGA

SEQ ID NO: 22872 - protein, 11 aa, Homo sapiens
  AACR GENIE Results; CTNNB1_p.G34E; A0201
YLDSEIHSGAT

SEQ ID NO: 22873 - protein, 9 aa, Homo sapiens
  AACR GENIE Results; CTNNB1_p.G34E; A0201
YLDSEIHSG

SEQ ID NO: 22874 - protein, 11 aa, Homo sapiens
  AACR GENIE Results; CTNNB1_p.G34E; A0101
YLDSEIHSGAT

SEQ ID NO: 22875 - protein, 9 aa, Homo sapiens
  AACR GENIE Results; CTNNB1_p.G34E; A0201
LDSEIHSGA

SEQ ID NO: 22876 - protein, 10 aa, Homo sapiens
  AACR GENIE Results; CTNNB1_p.G34E; A0101
YLDSEIHSGA

SEQ ID NO: 22877 - protein, 9 aa, Homo sapiens
  AACR GENIE Results; CTNNB1_p.G34E; B0801
EIHSGATTT

SEQ ID NO: 22878 - protein, 11 aa, Homo sapiens
  AACR GENIE Results; CTNNB1_p.G34E; A1101
SEIHSGATTTA

SEQ ID NO: 22879 - protein, 10 aa, Homo sapiens
  AACR GENIE Results; CTNNB1_p.G34R; B1501
RIHSGATTTA

SEQ ID NO: 22880 - protein, 10 aa, Homo sapiens
  AACR GENIE Results; CTNNB1_p.G34R; A0201
YLDSRIHSGA

SEQ ID NO: 22881 - protein, 9 aa, Homo sapiens
  AACR GENIE Results; CTNNB1_p.G34R; B1501
RIHSGATTT

SEQ ID NO: 22882 - protein, 10 aa, Homo sapiens
  AACR GENIE Results; CTNNB1_p.G34R; A0301
RIHSGATTTA

SEQ ID NO: 22883 - protein, 8 aa, Homo sapiens
  AACR GENIE Results; CTNNB1_p.G34R; B5101
QSYLDSRI

SEQ ID NO: 22884 - protein, 9 aa, Homo sapiens
  AACR GENIE Results; CTNNB1_p.G34R; A0201
YLDSRIHSG

SEQ ID NO: 22885 - protein, 10 aa, Homo sapiens
  AACR GENIE Results; CTNNB1_p.G34R; B0702
RIHSGATTTA

SEQ ID NO: 22886 - protein, 8 aa, Homo sapiens
  AACR GENIE Results; CTNNB1_p.G34V; B1402
DSVIHSGA

SEQ ID NO: 22887 - protein, 10 aa, Homo sapiens
  AACR GENIE Results; CTNNB1_p.G34V; A3101
SYLDSVIHSG

SEQ ID NO: 22888 - protein, 9 aa, Homo sapiens
  AACR GENIE Results; CTNNB1_p.G34V; B1302
QQSYLDSVI

SEQ ID NO: 22889 - protein, 9 aa, Homo sapiens
  AACR GENIE Results; CTNNB1_p.G34V; B3801
QQSYLDSVI

SEQ ID NO: 22890 - protein, 9 aa, Homo sapiens
  AACR GENIE Results; CTNNB1_p.G34V; B1302
QQQSYLDSV

SEQ ID NO: 22891 - protein, 10 aa, Homo sapiens
  AACR GENIE Results; CTNNB1_p.G34V; A2902
SYLDSVIHSG

SEQ ID NO: 22892 - protein, 9 aa, Homo sapiens
  AACR GENIE Results; CTNNB1_p.G34V; A2301
SYLDSVIHS

SEQ ID NO: 22893 - protein, 10 aa, Homo sapiens
  AACR GENIE Results; CTNNB1_p.G34V; A0201
YLDSVIHSGA

SEQ ID NO: 22894 - protein, 10 aa, Homo sapiens
  AACR GENIE Results; CTNNB1_p.G34V; B1501
VIHSGATTTA

SEQ ID NO: 22895 - protein, 9 aa, Homo sapiens
  AACR GENIE Results; CTNNB1_p.G34V; B1501
VIHSGATTT

SEQ ID NO: 22896 - protein, 10 aa, Homo sapiens
  AACR GENIE Results; CTNNB1_p.G34V; A2301
SYLDSVIHSG

SEQ ID NO: 22897 - protein, 9 aa, Homo sapiens
  AACR GENIE Results; CTNNB1_p.G34V; A0201
YLDSVIHSG

SEQ ID NO: 22898 - protein, 11 aa, Homo sapiens
  AACR GENIE Results; CTNNB1_p.G34V; B1501
SVIHSGATTTA

SEQ ID NO: 22899 - protein, 10 aa, Homo sapiens
  AACR GENIE Results; CTNNB1_p.G34V; A6801
SVIHSGATTT

SEQ ID NO: 22900 - protein, 9 aa, Homo sapiens
  AACR GENIE Results; CTNNB1_p.G34V; A3101
SYLDSVIHS

SEQ ID NO: 22901 - protein, 9 aa, Homo sapiens
  AACR GENIE Results; CTNNB1_p.G34V; B1501
SVIHSGATT

SEQ ID NO: 22902 - protein, 9 aa, Homo sapiens
  AACR GENIE Results; CTNNB1_p.G34V; B1302
YLDSVIHSG

SEQ ID NO: 22903 - protein, 10 aa, Homo sapiens
  AACR GENIE Results; CTNNB1_p.G34V; A1101
SVIHSGATTT

SEQ ID NO: 22904 - protein, 11 aa, Homo sapiens
  AACR GENIE Results; CTNNB1_p.G34V; A0101
YLDSVIHSGAT

SEQ ID NO: 22905 - protein, 8 aa, Homo sapiens
  AACR GENIE Results; CTNNB1_p.G34V; B1302
QQSYLDSV

SEQ ID NO: 22906 - protein, 8 aa, Homo sapiens
  AACR GENIE Results; CTNNB1_p.G34V; B5101
QSYLDSVI

SEQ ID NO: 22907 - protein, 11 aa, Homo sapiens
  AACR GENIE Results; CTNNB1_p.G34V; A3101
SYLDSVIHSGA

SEQ ID NO: 22908 - protein, 9 aa, Homo sapiens
  AACR GENIE Results; CTNNB1_p.G34V; B0801
VIHSGATTT

SEQ ID NO: 22909 - protein, 11 aa, Homo sapiens
  AACR GENIE Results; CTNNB1_p.G34V; A0201
SYLDSVIHSGA

SEQ ID NO: 22910 - protein, 9 aa, Homo sapiens
  AACR GENIE Results; CTNNB1_p.G34V; A2402
SYLDSVIHS

SEQ ID NO: 22911 - protein, 11 aa, Homo sapiens
  AACR GENIE Results; CTNNB1_p.G34V; A1101
SVIHSGATTTA

SEQ ID NO: 22912 - protein, 10 aa, Homo sapiens
  AACR GENIE Results; CTNNB1_p.G34V; B2705
SYLDSVIHSG

SEQ ID NO: 22913 - protein, 8 aa, Homo sapiens
  AACR GENIE Results; CTNNB1_p.G34V; B0801
DSVIHSGA

SEQ ID NO: 22914 - protein, 9 aa, Homo sapiens
  AACR GENIE Results; CTNNB1_p.G34V; A0101
YLDSVIHSG

SEQ ID NO: 22915 - protein, 11 aa, Homo sapiens
  AACR GENIE Results; CTNNB1_p.G34V; A6801
SVIHSGATTTA

SEQ ID NO: 22916 - protein, 10 aa, Homo sapiens
  AACR GENIE Results; CTNNB1_p.G34V; A3101
SVIHSGATTT

SEQ ID NO: 22917 - protein, 10 aa, Homo sapiens
  AACR GENIE Results; CTNNB1_p.G34V; B1302
VIHSGATTTA

SEQ ID NO: 22918 - protein, 8 aa, Homo sapiens
  AACR GENIE Results; CTNNB1_p.G34V; B5101
DSVIHSGA

SEQ ID NO: 22919 - protein, 9 aa, Homo sapiens
  AACR GENIE Results; CTNNB1_p.G34V; A3101
QQQSYLDSV

SEQ ID NO: 22920 - protein, 9 aa, Homo sapiens
  AACR GENIE Results; CTNNB1_p.G34V; C0802
YLDSVIHSG

SEQ ID NO: 22921 - protein, 11 aa, Homo sapiens
  AACR GENIE Results; CTNNB1_p.G34V; A0201
YLDSVIHSGAT

SEQ ID NO: 22922 - protein, 9 aa, Homo sapiens
  AACR GENIE Results; CTNNB1_p.G34V; A0201
QQQSYLDSV

SEQ ID NO: 22923 - protein, 11 aa, Homo sapiens
  AACR GENIE Results; CTNNB1_p.G34V; B3501
SVIHSGATTTA

SEQ ID NO: 22924 - protein, 9 aa, Homo sapiens
  AACR GENIE Results; CTNNB1_p.G34V; A1101
QSYLDSVIH

SEQ ID NO: 22925 - protein, 9 aa, Homo sapiens
  AACR GENIE Results; CTNNB1_p.G34V; B1302
VIHSGATTT

SEQ ID NO: 22926 - protein, 10 aa, Homo sapiens
  AACR GENIE Results; CTNNB1_p.G34V; A1101
SYLDSVIHSG

SEQ ID NO: 22927 - protein, 9 aa, Homo sapiens
  AACR GENIE Results; CTNNB1_p.G34V; B0702
SVIHSGATT

SEQ ID NO: 22928 - protein, 9 aa, Homo sapiens
  AACR GENIE Results; CTNNB1_p.G575R; C0304
IVEGCTRAL

SEQ ID NO: 22929 - protein, 9 aa, Homo sapiens
  AACR GENIE Results; CTNNB1_p.G575R; B2705
TRALHILAR

SEQ ID NO: 22930 - protein, 9 aa, Homo sapiens
  AACR GENIE Results; CTNNB1_p.G575R; C0802
IVEGCTRAL

SEQ ID NO: 22931 - protein, 8 aa, Homo sapiens
  AACR GENIE Results; CTNNB1_p.G575R; A6801
EIVEGCTR

SEQ ID NO: 22932 - protein, 9 aa, Homo sapiens
  AACR GENIE Results; CTNNB1_p.G575R; B4403
EEIVEGCTR

SEQ ID NO: 22933 - protein, 9 aa, Homo sapiens
  AACR GENIE Results; CTNNB1_p.G575R; C0303
IVEGCTRAL

SEQ ID NO: 22934 - protein, 9 aa, Homo sapiens
  AACR GENIE Results; CTNNB1_p.G575R; B0702
IVEGCTRAL

SEQ ID NO: 22935 - protein, 11 aa, Homo sapiens
  AACR GENIE Results; CTNNB1_p.G575R; B4402
EEIVEGCTRAL

SEQ ID NO: 22936 - protein, 9 aa, Homo sapiens
  AACR GENIE Results; CTNNB1_p.G575R; A2601
EIVEGCTRA

SEQ ID NO: 22937 - protein, 9 aa, Homo sapiens
  AACR GENIE Results; CTNNB1_p.G575R; A6801
EEIVEGCTR

SEQ ID NO: 22938 - protein, 9 aa, Homo sapiens
  AACR GENIE Results; CTNNB1_p.G575R; C0102
IVEGCTRAL

SEQ ID NO: 22939 - protein, 8 aa, Homo sapiens
  AACR GENIE Results; CTNNB1_p.G575R; A3101
RALHILAR

SEQ ID NO: 22940 - protein, 11 aa, Homo sapiens
  AACR GENIE Results; CTNNB1_p.G575R; A3101
RMEEIVEGCTR

SEQ ID NO: 22941 - protein, 10 aa, Homo sapiens
  AACR GENIE Results; CTNNB1_p.G575R; A2601
EIVEGCTRAL

SEQ ID NO: 22942 - protein, 11 aa, Homo sapiens
  AACR GENIE Results; CTNNB1_p.G575R; B4403
EEIVEGCTRAL

SEQ ID NO: 22943 - protein, 9 aa, Homo sapiens
  AACR GENIE Results; CTNNB1_p.G575R; B4402
EEIVEGCTR

SEQ ID NO: 22944 - protein, 10 aa, Homo sapiens
  AACR GENIE Results; CTNNB1_p.G575R; A6801
EIVEGCTRAL

SEQ ID NO: 22945 - protein, 10 aa, Homo sapiens
  AACR GENIE Results; CTNNB1_p.G575R; A3101
CTRALHILAR

SEQ ID NO: 22946 - protein, 10 aa, Homo sapiens
  AACR GENIE Results; CTNNB1_p.I35S; A0201
YLDSGSHSGA

SEQ ID NO: 22947 - protein, 9 aa, Homo sapiens
  AACR GENIE Results; CTNNB1_p.I35S; B3901
SHSGATTTA

SEQ ID NO: 22948 - protein, 9 aa, Homo sapiens
  AACR GENIE Results; CTNNB1_p.I35S; C0802
YLDSGSHSG

SEQ ID NO: 22949 - protein, 9 aa, Homo sapiens
  AACR GENIE Results; CTNNB1_p.I35S; B3901
YLDSGSHSG

SEQ ID NO: 22950 - protein, 9 aa, Homo sapiens
  AACR GENIE Results; CTNNB1_p.I35S; B3801
SHSGATTTA

SEQ ID NO: 22951 - protein, 11 aa, Homo sapiens
  AACR GENIE Results; CTNNB1_p.I35S; A3303
SYLDSGSHSGA

SEQ ID NO: 22952 - protein, 9 aa, Homo sapiens
  AACR GENIE Results; CTNNB1_p.I35S; A0201
YLDSGSHSG

SEQ ID NO: 22953 - protein, 10 aa, Homo sapiens
  AACR GENIE Results; CTNNB1_p.I35S; A0101
YLDSGSHSGA

SEQ ID NO: 22954 - protein, 10 aa, Homo sapiens
  AACR GENIE Results; CTNNB1_p.I35S; B3901
SYLDSGSHSG

SEQ ID NO: 22955 - protein, 10 aa, Homo sapiens
  AACR GENIE Results; CTNNB1_p.I35S; C0802
YLDSGSHSGA

SEQ ID NO: 22956 - protein, 8 aa, Homo sapiens
  AACR GENIE Results; CTNNB1_p.I35S; B3901
SHSGATTT

SEQ ID NO: 22957 - protein, 10 aa, Homo sapiens
  AACR GENIE Results; CTNNB1_p.I35S; B3901
SHSGATTTAP

SEQ ID NO: 22958 - protein, 10 aa, Homo sapiens
  AACR GENIE Results; CTNNB1_p.I35S; A3303
SYLDSGSHSG

SEQ ID NO: 22959 - protein, 10 aa, Homo sapiens
  AACR GENIE Results; CTNNB1_p.I35S; A2902
SYLDSGSHSG

SEQ ID NO: 22960 - protein, 10 aa, Homo sapiens
  AACR GENIE Results; CTNNB1_p.I35S; A3101
SYLDSGSHSG

SEQ ID NO: 22961 - protein, 11 aa, Homo sapiens
  AACR GENIE Results; CTNNB1_p.I35S; B3901
YLDSGSHSGAT

SEQ ID NO: 22962 - protein, 9 aa, Homo sapiens
  AACR GENIE Results; CTNNB1_p.I35S; B1302
YLDSGSHSG

SEQ ID NO: 22963 - protein, 11 aa, Homo sapiens
  AACR GENIE Results; CTNNB1_p.I35S; A3001
SYLDSGSHSGA

SEQ ID NO: 22964 - protein, 11 aa, Homo sapiens
  AACR GENIE Results; CTNNB1_p.I35S; A0201
YLDSGSHSGAT

SEQ ID NO: 22965 - protein, 10 aa, Homo sapiens
  AACR GENIE Results; CTNNB1_p.I35S; C1402
SYLDSGSHSG

SEQ ID NO: 22966 - protein, 10 aa, Homo sapiens
  AACR GENIE Results; CTNNB1_p.I35S; A0301
YLDSGSHSGA

SEQ ID NO: 22967 - protein, 11 aa, Homo sapiens
  AACR GENIE Results; CTNNB1_p.I35S; A3101
SYLDSGSHSGA

SEQ ID NO: 22968 - protein, 10 aa, Homo sapiens
  AACR GENIE Results; CTNNB1_p.I35S; B2702
YLDSGSHSGA

SEQ ID NO: 22969 - protein, 11 aa, Homo sapiens
  AACR GENIE Results; CTNNB1_p.I35S; B0801
YLDSGSHSGAT

SEQ ID NO: 22970 - protein, 11 aa, Homo sapiens
  AACR GENIE Results; CTNNB1_p.I35S; A0101
YLDSGSHSGAT

SEQ ID NO: 22971 - protein, 9 aa, Homo sapiens
  AACR GENIE Results; CTNNB1_p.I35S; A0101
YLDSGSHSG

SEQ ID NO: 22972 - protein, 9 aa, Homo sapiens
  AACR GENIE Results; CTNNB1_p.I35S; A3303
SYLDSGSHS

SEQ ID NO: 22973 - protein, 10 aa, Homo sapiens
  AACR GENIE Results; CTNNB1_p.I35S; B1302
YLDSGSHSGA

SEQ ID NO: 22974 - protein, 10 aa, Homo sapiens
  AACR GENIE Results; CTNNB1_p.I35S; A6802
YLDSGSHSGA

SEQ ID NO: 22975 - protein, 10 aa, Homo sapiens
  AACR GENIE Results; CTNNB1_p.I35S; B1501
GSHSGATTTA

SEQ ID NO: 22976 - protein, 11 aa, Homo sapiens
  AACR GENIE Results; CTNNB1_p.I35S; B3901
SYLDSGSHSGA

SEQ ID NO: 22977 - protein, 10 aa, Homo sapiens
  AACR GENIE Results; CTNNB1_p.I35S; B3801
SHSGATTTAP

SEQ ID NO: 22978 - protein, 11 aa, Homo sapiens
  AACR GENIE Results; CTNNB1_p.I35S; A0201
SYLDSGSHSGA

SEQ ID NO: 22979 - protein, 11 aa, Homo sapiens
  AACR GENIE Results; CTNNB1_p.I35S; A6802
YLDSGSHSGAT

SEQ ID NO: 22980 - protein, 10 aa, Homo sapiens
  AACR GENIE Results; CTNNB1_p.I35S; A2402
SYLDSGSHSG

SEQ ID NO: 22981 - protein, 10 aa, Homo sapiens
  AACR GENIE Results; CTNNB1_p.K335I; B5701
RTYTYEILLW

SEQ ID NO: 22982 - protein, 9 aa, Homo sapiens
  AACR GENIE Results; CTNNB1_p.K335I; A2402
TYTYEILLW

SEQ ID NO: 22983 - protein, 9 aa, Homo sapiens
  AACR GENIE Results; CTNNB1_p.K335I; C1502
RTYTYEILL

SEQ ID NO: 22984 - protein, 9 aa, Homo sapiens
  AACR GENIE Results; CTNNB1_p.K335I; B5701
RTYTYEILL

SEQ ID NO: 22985 - protein, 9 aa, Homo sapiens
  AACR GENIE Results; CTNNB1_p.K335I; A2301
TYTYEILLW

SEQ ID NO: 22986 - protein, 9 aa, Homo sapiens
  AACR GENIE Results; CTNNB1_p.K335I; B2702
EILLWTTSR

SEQ ID NO: 22987 - protein, 9 aa, Homo sapiens
  AACR GENIE Results; CTNNB1_p.K335I; A6801
EILLWTTSR

SEQ ID NO: 22988 - protein, 9 aa, Homo sapiens
  AACR GENIE Results; CTNNB1_p.K335I; C0701
RTYTYEILL

SEQ ID NO: 22989 - protein, 9 aa, Homo sapiens
  AACR GENIE Results; CTNNB1_p.K335I; A3101
EILLWTTSR

SEQ ID NO: 22990 - protein, 8 aa, Homo sapiens
  AACR GENIE Results; CTNNB1_p.K335I; B5701
YTYEILLW

SEQ ID NO: 22991 - protein, 9 aa, Homo sapiens
  AACR GENIE Results; CTNNB1_p.K335I; A0201
ILLWTTSRV

SEQ ID NO: 22992 - protein, 9 aa, Homo sapiens
  AACR GENIE Results; CTNNB1_p.K335I; B4901
YEILLWTTS

SEQ ID NO: 22993 - protein, 9 aa, Homo sapiens
  AACR GENIE Results; CTNNB1_p.K335I; C1701
RTYTYEILL

SEQ ID NO: 22994 - protein, 11 aa, Homo sapiens
  AACR GENIE Results; CTNNB1_p.K335I; A0301
ILLWTTSRVLK

SEQ ID NO: 22995 - protein, 9 aa, Homo sapiens
  AACR GENIE Results; CTNNB1_p.K335I; C1203
RTYTYEILL

SEQ ID NO: 22996 - protein, 9 aa, Homo sapiens
  AACR GENIE Results; CTNNB1_p.K335I; C1601
RTYTYEILL

SEQ ID NO: 22997 - protein, 9 aa, Homo sapiens
  AACR GENIE Results; CTNNB1_p.M553V; B1501
SVGGTQQQF

SEQ ID NO: 22998 - protein, 9 aa, Homo sapiens
  AACR GENIE Results; CTNNB1_p.M553V; A3201
SVGGTQQQF

SEQ ID NO: 22999 - protein, 10 aa, Homo sapiens
  AACR GENIE Results; CTNNB1_p.M553V; B3501
TSVGGTQQQF

SEQ ID NO: 23000 - protein, 10 aa, Homo sapiens
  AACR GENIE Results; CTNNB1_p.M553V; B1501
TSVGGTQQQF

SEQ ID NO: 23001 - protein, 10 aa, Homo sapiens
  AACR GENIE Results; CTNNB1_p.M553V; A2601
TSVGGTQQQF

SEQ ID NO: 23002 - protein, 11 aa, Homo sapiens
  AACR GENIE Results; CTNNB1_p.M553V; B1501
RTSVGGTQQQF

SEQ ID NO: 23003 - protein, 11 aa, Homo sapiens
  AACR GENIE Results; CTNNB1_p.M553V; A3201
RTSVGGTQQQF

SEQ ID NO: 23004 - protein, 9 aa, Homo sapiens
  AACR GENIE Results; CTNNB1_p.M553V; B0801
QDTQRRTSV

SEQ ID NO: 23005 - protein, 9 aa, Homo sapiens
  AACR GENIE Results; CTNNB1_p.M553V; B3501
SVGGTQQQF

SEQ ID NO: 23006 - protein, 8 aa, Homo sapiens
  AACR GENIE Results; CTNNB1_p.M553V; C1601
VGGTQQQF

SEQ ID NO: 23007 - protein, 9 aa, Homo sapiens
  AACR GENIE Results; CTNNB1_p.M553V; B0702
QDTQRRTSV

SEQ ID NO: 23008 - protein, 9 aa, Homo sapiens
  AACR GENIE Results; CTNNB1_p.M553V; A2601
SVGGTQQQF

SEQ ID NO: 23009 - protein, 10 aa, Homo sapiens
  AACR GENIE Results; CTNNB1_p.M553V; B4403
TSVGGTQQQF

SEQ ID NO: 23010 - protein, 8 aa, Homo sapiens
  AACR GENIE Results; CTNNB1_p.M553V; B1501
VGGTQQQF

SEQ ID NO: 23011 - protein, 8 aa, Homo sapiens
  AACR GENIE Results; CTNNB1_p.M553V; B0801
VGGTQQQF

SEQ ID NO: 23012 - protein, 9 aa, Homo sapiens
  AACR GENIE Results; CTNNB1_p.M553V; B0702
SVGGTQQQF

SEQ ID NO: 23013 - protein, 10 aa, Homo sapiens
  AACR GENIE Results; CTNNB1_p.M553V; A1101
TSVGGTQQQF

SEQ ID NO: 23014 - protein, 11 aa, Homo sapiens
  AACR GENIE Results; CTNNB1_p.N387K; A0301
TLRKLSDAATK

SEQ ID NO: 23015 - protein, 8 aa, Homo sapiens
  AACR GENIE Results; CTNNB1_p.N387K; A0301
KLSDAATK

SEQ ID NO: 23016 - protein, 8 aa, Homo sapiens
  AACR GENIE Results; CTNNB1_p.R582W; C0401
AWDVHNRI

SEQ ID NO: 23017 - protein, 9 aa, Homo sapiens
  AACR GENIE Results; CTNNB1_p.R582W; B5701
TGALHILAW

SEQ ID NO: 23018 - protein, 8 aa, Homo sapiens
  AACR GENIE Results; CTNNB1_p.R582W; A3303
LAWDVHNR

SEQ ID NO: 23019 - protein, 9 aa, Homo sapiens
  AACR GENIE Results; CTNNB1_p.R582W; A3101
ILAWDVHNR

SEQ ID NO: 23020 - protein, 9 aa, Homo sapiens
  AACR GENIE Results; CTNNB1_p.R582W; B5101
LAWDVHNRI

SEQ ID NO: 23021 - protein, 8 aa, Homo sapiens
  AACR GENIE Results; CTNNB1_p.R582W; B5701
GALHILAW

SEQ ID NO: 23022 - protein, 8 aa, Homo sapiens
  AACR GENIE Results; CTNNB1_p.R582W; A3101
LAWDVHNR

SEQ ID NO: 23023 - protein, 9 aa, Homo sapiens
  AACR GENIE Results; CTNNB1_p.R582W; A6802
LAWDVHNRI

SEQ ID NO: 23024 - protein, 8 aa, Homo sapiens
  AACR GENIE Results; CTNNB1_p.R582W; A6801
LAWDVHNR

SEQ ID NO: 23025 - protein, 9 aa, Homo sapiens
  AACR GENIE Results; CTNNB1_p.R582W; C0401
AWDVHNRIV

SEQ ID NO: 23026 - protein, 9 aa, Homo sapiens
  AACR GENIE Results; CTNNB1_p.R582W; B4403
TGALHILAW

SEQ ID NO: 23027 - protein, 9 aa, Homo sapiens
  AACR GENIE Results; CTNNB1_p.R582W; A0201
ALHILAWDV

SEQ ID NO: 23028 - protein, 9 aa, Homo sapiens
  AACR GENIE Results; CTNNB1_p.R582W; B5701
LAWDVHNRI

SEQ ID NO: 23029 - protein, 10 aa, Homo sapiens
  AACR GENIE Results; CTNNB1_p.R582W; A3101
HILAWDVHNR

SEQ ID NO: 23030 - protein, 9 aa, Homo sapiens
  AACR GENIE Results; CTNNB1_p.R661Q; B3501
YAAAVLFQM

SEQ ID NO: 23031 - protein, 9 aa, Homo sapiens
  AACR GENIE Results; CTNNB1_p.R661Q; C0202
YAAAVLFQM

SEQ ID NO: 23032 - protein, 9 aa, Homo sapiens
  AACR GENIE Results; CTNNB1_p.R661Q; C1601
YAAAVLFQM

SEQ ID NO: 23033 - protein, 9 aa, Homo sapiens
  AACR GENIE Results; CTNNB1_p.R661Q; C0304
YAAAVLFQM

SEQ ID NO: 23034 - protein, 8 aa, Homo sapiens
  AACR GENIE Results; CTNNB1_p.R661Q; C1601
AAAVLFQM

SEQ ID NO: 23035 - protein, 9 aa, Homo sapiens
  AACR GENIE Results; CTNNB1_p.R661Q; C0303
YAAAVLFQM

SEQ ID NO: 23036 - protein, 9 aa, Homo sapiens
  AACR GENIE Results; CTNNB1_p.R661Q; C1203
YAAAVLFQM

SEQ ID NO: 23037 - protein, 10 aa, Homo sapiens
  AACR GENIE Results; CTNNB1_p.R661Q; A2402
TYAAAVLFQM

SEQ ID NO: 23038 - protein, 10 aa, Homo sapiens
  AACR GENIE Results; CTNNB1_p.R661Q; A1101
AVLFQMSEDK

SEQ ID NO: 23039 - protein, 10 aa, Homo sapiens
  AACR GENIE Results; CTNNB1_p.R661Q; A2301
TYAAAVLFQM

SEQ ID NO: 23040 - protein, 8 aa, Homo sapiens
  AACR GENIE Results; CTNNB1_p.R661Q; B3501
AAAVLFQM

SEQ ID NO: 23041 - protein, 11 aa, Homo sapiens
  AACR GENIE Results; CTNNB1_p.R661Q; B1501
FQMSEDKPQDY

SEQ ID NO: 23042 - protein, 8 aa, Homo sapiens
  AACR GENIE Results; CTNNB1_p.R661Q; C1203
AAAVLFQM

SEQ ID NO: 23043 - protein, 8 aa, Homo sapiens
  AACR GENIE Results; CTNNB1_p.R661Q; B1501
AAAVLFQM

SEQ ID NO: 23044 - protein, 9 aa, Homo sapiens
  AACR GENIE Results; CTNNB1_p.R661Q; B1302
YAAAVLFQM

SEQ ID NO: 23045 - protein, 10 aa, Homo sapiens
  AACR GENIE Results; CTNNB1_p.R661Q; A2902
TYAAAVLFQM

SEQ ID NO: 23046 - protein, 8 aa, Homo sapiens
  AACR GENIE Results; CTNNB1_p.R661Q; B0801
AAAVLFQM

SEQ ID NO: 23047 - protein, 9 aa, Homo sapiens
  AACR GENIE Results; CTNNB1_p.R661Q; A0201
YAAAVLFQM

SEQ ID NO: 23048 - protein, 8 aa, Homo sapiens
  AACR GENIE Results; CTNNB1_p.R661Q; A1101
AAAVLFQM

SEQ ID NO: 23049 - protein, 10 aa, Homo sapiens
  AACR GENIE Results; CTNNB1_p.R661Q; A0101
QMSEDKPQDY

SEQ ID NO: 23050 - protein, 9 aa, Homo sapiens
  AACR GENIE Results; CTNNB1_p.R661Q; A6801
YAAAVLFQM

SEQ ID NO: 23051 - protein, 8 aa, Homo sapiens
  AACR GENIE Results; CTNNB1_p.R661Q; B1302
AAAVLFQM

SEQ ID NO: 23052 - protein, 9 aa, Homo sapiens
  AACR GENIE Results; CTNNB1_p.R661Q; B5701
YAAAVLFQM

SEQ ID NO: 23053 - protein, 10 aa, Homo sapiens
  AACR GENIE Results; CTNNB1_p.R661Q; A0301
AVLFQMSEDK

SEQ ID NO: 23054 - protein, 9 aa, Homo sapiens
  AACR GENIE Results; CTNNB1_p.R661Q; A1101
YAAAVLFQM

SEQ ID NO: 23055 - protein, 8 aa, Homo sapiens
  AACR GENIE Results; CTNNB1_p.R661Q; B5101
AAAVLFQM

SEQ ID NO: 23056 - protein, 9 aa, Homo sapiens
  AACR GENIE Results; CTNNB1_p.R661Q; C1502
YAAAVLFQM

SEQ ID NO: 23057 - protein, 8 aa, Homo sapiens
  AACR GENIE Results; CTNNB1_p.R661Q; B5701
AAAVLFQM

SEQ ID NO: 23058 - protein, 9 aa, Homo sapiens
  AACR GENIE Results; CTNNB1_p.R661Q; A2902
YAAAVLFQM

SEQ ID NO: 23059 - protein, 9 aa, Homo sapiens
  AACR GENIE Results; CTNNB1_p.R661Q; B5101
YAAAVLFQM

SEQ ID NO: 23060 - protein, 9 aa, Homo sapiens
  AACR GENIE Results; CTNNB1_p.R661Q; A3001
YAAAVLFQM

SEQ ID NO: 23061 - protein, 10 aa, Homo sapiens
  AACR GENIE Results; CTNNB1_p.R661Q; A2902
QMSEDKPQDY

SEQ ID NO: 23062 - protein, 9 aa, Homo sapiens
  AACR GENIE Results; CTNNB1_p.R661Q; B0702
YAAAVLFQM

SEQ ID NO: 23063 - protein, 8 aa, Homo sapiens
  AACR GENIE Results; CTNNB1_p.R661Q; A6801
AAAVLFQM

SEQ ID NO: 23064 - protein, 10 aa, Homo sapiens
  AACR GENIE Results; CTNNB1_p.R661Q; B1501
QMSEDKPQDY

SEQ ID NO: 23065 - protein, 11 aa, Homo sapiens
  AACR GENIE Results; CTNNB1_p.R661Q; A1101
QMSEDKPQDYK

SEQ ID NO: 23066 - protein, 9 aa, Homo sapiens
  AACR GENIE Results; CTNNB1_p.R661Q; A2601
YAAAVLFQM

SEQ ID NO: 23067 - protein, 8 aa, Homo sapiens
  AACR GENIE Results; CTNNB1_p.R661Q; A2601
AAAVLFQM

SEQ ID NO: 23068 - protein, 8 aa, Homo sapiens
  AACR GENIE Results; CTNNB1_p.R661Q; B0702
AAAVLFQM

SEQ ID NO: 23069 - protein, 11 aa, Homo sapiens
  AACR GENIE Results; CTNNB1_p.R661Q; A3101
TYAAAVLFQMS

SEQ ID NO: 23070 - protein, 9 aa, Homo sapiens
  AACR GENIE Results; CTNNB1_p.S33C; B1302
QQSYLDCGI

SEQ ID NO: 23071 - protein, 10 aa, Homo sapiens
  AACR GENIE Results; CTNNB1_p.S33C; A0201
YLDCGIHSGA

SEQ ID NO: 23072 - protein, 9 aa, Homo sapiens
  AACR GENIE Results; CTNNB1_p.S33C; B3801
QQSYLDCGI

SEQ ID NO: 23073 - protein, 9 aa, Homo sapiens
  AACR GENIE Results; CTNNB1_p.S33C; A0201
YLDCGIHSG

SEQ ID NO: 23074 - protein, 9 aa, Homo sapiens
  AACR GENIE Results; CTNNB1_p.S33F; B1302
QQSYLDFGI

SEQ ID NO: 23075 - protein, 10 aa, Homo sapiens
  AACR GENIE Results; CTNNB1_p.S33F; A0201
YLDFGIHSGA

SEQ ID NO: 23076 - protein, 10 aa, Homo sapiens
  AACR GENIE Results; CTNNB1_p.S33F; A3101
SYLDFGIHSG

SEQ ID NO: 23077 - protein, 10 aa, Homo sapiens
  AACR GENIE Results; CTNNB1_p.S33F; A2301
SYLDFGIHSG

SEQ ID NO: 23078 - protein, 9 aa, Homo sapiens
  AACR GENIE Results; CTNNB1_p.S33F; A3101
SYLDFGIHS

SEQ ID NO: 23079 - protein, 10 aa, Homo sapiens
  AACR GENIE Results; CTNNB1_p.S33F; B0801
FGIHSGATTT

SEQ ID NO: 23080 - protein, 11 aa, Homo sapiens
  AACR GENIE Results; CTNNB1_p.S33F; A0201
YLDFGIHSGAT

SEQ ID NO: 23081 - protein, 9 aa, Homo sapiens
  AACR GENIE Results; CTNNB1_p.S33F; A2301
SYLDFGIHS

SEQ ID NO: 23082 - protein, 9 aa, Homo sapiens
  AACR GENIE Results; CTNNB1_p.S33F; B3801
QQSYLDFGI

SEQ ID NO: 23083 - protein, 10 aa, Homo sapiens
  AACR GENIE Results; CTNNB1_p.S33F; A0101
YLDFGIHSGA

SEQ ID NO: 23084 - protein, 9 aa, Homo sapiens
  AACR GENIE Results; CTNNB1_p.S33F; B1501
WQQQSYLDF

SEQ ID NO: 23085 - protein, 8 aa, Homo sapiens
  AACR GENIE Results; CTNNB1_p.S33F; B1501
QQQSYLDF

SEQ ID NO: 23086 - protein, 8 aa, Homo sapiens
  AACR GENIE Results; CTNNB1_p.S33F; A1101
LDFGIHSG

SEQ ID NO: 23087 - protein, 9 aa, Homo sapiens
  AACR GENIE Results; CTNNB1_p.S33F; A0201
YLDFGIHSG

SEQ ID NO: 23088 - protein, 10 aa, Homo sapiens
  AACR GENIE Results; CTNNB1_p.S33F; A2902
YLDFGIHSGA

SEQ ID NO: 23089 - protein, 8 aa, Homo sapiens
  AACR GENIE Results; CTNNB1_p.S33F; A0201
LDFGIHSG

SEQ ID NO: 23090 - protein, 10 aa, Homo sapiens
  AACR GENIE Results; CTNNB1_p.S33F; A0201
LDFGIHSGAT

SEQ ID NO: 23091 - protein, 10 aa, Homo sapiens
  AACR GENIE Results; CTNNB1_p.S33P; A0201
YLDPGIHSGA

SEQ ID NO: 23092 - protein, 9 aa, Homo sapiens
  AACR GENIE Results; CTNNB1_p.S33P; B1302
QQSYLDPGI

SEQ ID NO: 23093 - protein, 10 aa, Homo sapiens
  AACR GENIE Results; CTNNB1_p.S33P; A3303
SYLDPGIHSG

SEQ ID NO: 23094 - protein, 11 aa, Homo sapiens
  AACR GENIE Results; CTNNB1_p.S33P; A3303
SYLDPGIHSGA

SEQ ID NO: 23095 - protein, 10 aa, Homo sapiens
  AACR GENIE Results; CTNNB1_p.S33P; A3101
SYLDPGIHSG

SEQ ID NO: 23096 - protein, 9 aa, Homo sapiens
  AACR GENIE Results; CTNNB1_p.S33P; B3801
QQSYLDPGI

SEQ ID NO: 23097 - protein, 9 aa, Homo sapiens
  AACR GENIE Results; CTNNB1_p.S33P; A0201
YLDPGIHSG

SEQ ID NO: 23098 - protein, 9 aa, Homo sapiens
  AACR GENIE Results; CTNNB1_p.S33P; B3901
YLDPGIHSG

SEQ ID NO: 23099 - protein, 11 aa, Homo sapiens
  AACR GENIE Results; CTNNB1_p.S33P; A0201
YLDPGIHSGAT

SEQ ID NO: 23100 - protein, 11 aa, Homo sapiens
  AACR GENIE Results; CTNNB1_p.S33P; A3101
SYLDPGIHSGA

SEQ ID NO: 23101 - protein, 10 aa, Homo sapiens
  AACR GENIE Results; CTNNB1_p.S33P; A0101
YLDPGIHSGA

SEQ ID NO: 23102 - protein, 9 aa, Homo sapiens
  AACR GENIE Results; CTNNB1_p.S33P; A3303
SYLDPGIHS

SEQ ID NO: 23103 - protein, 10 aa, Homo sapiens
  AACR GENIE Results; CTNNB1_p.S33P; A2902
SYLDPGIHSG

SEQ ID NO: 23104 - protein, 10 aa, Homo sapiens
  AACR GENIE Results; CTNNB1_p.S33P; B2702
YLDPGIHSGA

SEQ ID NO: 23105 - protein, 11 aa, Homo sapiens
  AACR GENIE Results; CTNNB1_p.S33P; A0101
YLDPGIHSGAT

SEQ ID NO: 23106 - protein, 10 aa, Homo sapiens
  AACR GENIE Results; CTNNB1_p.S33P; A2301
SYLDPGIHSG

SEQ ID NO: 23107 - protein, 10 aa, Homo sapiens
  AACR GENIE Results; CTNNB1_p.S33P; A6802
YLDPGIHSGA

SEQ ID NO: 23108 - protein, 10 aa, Homo sapiens
  AACR GENIE Results; CTNNB1_p.S33P; A1101
SYLDPGIHSG

SEQ ID NO: 23109 - protein, 10 aa, Homo sapiens
  AACR GENIE Results; CTNNB1_p.S33P; A0301
YLDPGIHSGA

SEQ ID NO: 23110 - protein, 10 aa, Homo sapiens
  AACR GENIE Results; CTNNB1_p.S33P; B3901
SYLDPGIHSG

SEQ ID NO: 23111 - protein, 11 aa, Homo sapiens
  AACR GENIE Results; CTNNB1_p.S33P; A2902
SYLDPGIHSGA

SEQ ID NO: 23112 - protein, 10 aa, Homo sapiens
  AACR GENIE Results; CTNNB1_p.S33P; B1302
QQQSYLDPGI

SEQ ID NO: 23113 - protein, 8 aa, Homo sapiens
  AACR GENIE Results; CTNNB1_p.S33P; B1302
QSYLDPGI

SEQ ID NO: 23114 - protein, 9 aa, Homo sapiens
  AACR GENIE Results; CTNNB1_p.S33P; A3101
SYLDPGIHS

SEQ ID NO: 23115 - protein, 9 aa, Homo sapiens
  AACR GENIE Results; CTNNB1_p.S33P; B3801
YLDPGIHSG

SEQ ID NO: 23116 - protein, 10 aa, Homo sapiens
  AACR GENIE Results; CTNNB1_p.S33P; C0704
LDPGIHSGAT

SEQ ID NO: 23117 - protein, 9 aa, Homo sapiens
  AACR GENIE Results; CTNNB1_p.S33P; C0802
YLDPGIHSG

SEQ ID NO: 23118 - protein, 9 aa, Homo sapiens
  AACR GENIE Results; CTNNB1_p.S33P; B1302
YLDPGIHSG

SEQ ID NO: 23119 - protein, 9 aa, Homo sapiens
  AACR GENIE Results; CTNNB1_p.S33P; A0101
YLDPGIHSG

SEQ ID NO: 23120 - protein, 8 aa, Homo sapiens
  AACR GENIE Results; CTNNB1_p.S33P; A1101
LDPGIHSG

SEQ ID NO: 23121 - protein, 8 aa, Homo sapiens
  AACR GENIE Results; CTNNB1_p.S33P; B5101
QSYLDPGI

SEQ ID NO: 23122 - protein, 9 aa, Homo sapiens
  AACR GENIE Results; CTNNB1_p.S33P; A3101
YLDPGIHSG

SEQ ID NO: 23123 - protein, 11 aa, Homo sapiens
  AACR GENIE Results; CTNNB1_p.S33P; A6802
YLDPGIHSGAT

SEQ ID NO: 23124 - protein, 10 aa, Homo sapiens
  AACR GENIE Results; CTNNB1_p.S33P; B3801
QQQSYLDPGI

SEQ ID NO: 23125 - protein, 10 aa, Homo sapiens
  AACR GENIE Results; CTNNB1_p.S33P; C0802
YLDPGIHSGA

SEQ ID NO: 23126 - protein, 10 aa, Homo sapiens
  AACR GENIE Results; CTNNB1_p.S33P; A2402
SYLDPGIHSG

SEQ ID NO: 23127 - protein, 10 aa, Homo sapiens
  AACR GENIE Results; CTNNB1_p.S33P; A3001
SYLDPGIHSG

SEQ ID NO: 23128 - protein, 11 aa, Homo sapiens
  AACR GENIE Results; CTNNB1_p.S33P; B3901
YLDPGIHSGAT

SEQ ID NO: 23129 - protein, 10 aa, Homo sapiens
  AACR GENIE Results; CTNNB1_p.S33P; B1302
YLDPGIHSGA

SEQ ID NO: 23130 - protein, 10 aa, Homo sapiens
  AACR GENIE Results; CTNNB1_p.S33P; C1402
SYLDPGIHSG

SEQ ID NO: 23131 - protein, 10 aa, Homo sapiens
  AACR GENIE Results; CTNNB1_p.S33P; A1101
YLDPGIHSGA

SEQ ID NO: 23132 - protein, 9 aa, Homo sapiens
  AACR GENIE Results; CTNNB1_p.S33P; B0801
YLDPGIHSG

SEQ ID NO: 23133 - protein, 10 aa, Homo sapiens
  AACR GENIE Results; CTNNB1_p.S33P; A6801
SYLDPGIHSG

SEQ ID NO: 23134 - protein, 10 aa, Homo sapiens
  AACR GENIE Results; CTNNB1_p.S33P; A3101
YLDPGIHSGA

SEQ ID NO: 23135 - protein, 9 aa, Homo sapiens
  AACR GENIE Results; CTNNB1_p.S33P; A1101
QSYLDPGIH

SEQ ID NO: 23136 - protein, 10 aa, Homo sapiens
  AACR GENIE Results; CTNNB1_p.S33P; B0801
LDPGIHSGAT

SEQ ID NO: 23137 - protein, 9 aa, Homo sapiens
  AACR GENIE Results; CTNNB1_p.S33P; A2601
YLDPGIHSG

SEQ ID NO: 23138 - protein, 11 aa, Homo sapiens
  AACR GENIE Results; CTNNB1_p.S33P; A3101
YLDPGIHSGAT

SEQ ID NO: 23139 - protein, 9 aa, Homo sapiens
  AACR GENIE Results; CTNNB1_p.S33P; A0301
QSYLDPGIH

SEQ ID NO: 23140 - protein, 10 aa, Homo sapiens
  AACR GENIE Results; CTNNB1_p.S33P; A6801
LDPGIHSGAT

SEQ ID NO: 23141 - protein, 11 aa, Homo sapiens
  AACR GENIE Results; CTNNB1_p.S33P; A0201
SYLDPGIHSGA

SEQ ID NO: 23142 - protein, 10 aa, Homo sapiens
  AACR GENIE Results; CTNNB1_p.S33P; B1501
YLDPGIHSGA

SEQ ID NO: 23143 - protein, 9 aa, Homo sapiens
  AACR GENIE Results; CTNNB1_p.S37C; A0201
YLDSGIHCG

SEQ ID NO: 23144 - protein, 10 aa, Homo sapiens
  AACR GENIE Results; CTNNB1_p.S37C; A0201
YLDSGIHCGA

SEQ ID NO: 23145 - protein, 9 aa, Homo sapiens
  AACR GENIE Results; CTNNB1_p.S37C; C1402
SYLDSGIHC

SEQ ID NO: 23146 - protein, 10 aa, Homo sapiens
  AACR GENIE Results; CTNNB1_p.S37C; A3303
SYLDSGIHCG

SEQ ID NO: 23147 - protein, 10 aa, Homo sapiens
  AACR GENIE Results; CTNNB1_p.S37C; A3101
SYLDSGIHCG

SEQ ID NO: 23148 - protein, 10 aa, Homo sapiens
  AACR GENIE Results; CTNNB1_p.S37C; A0201
SYLDSGIHCG

SEQ ID NO: 23149 - protein, 9 aa, Homo sapiens
  AACR GENIE Results; CTNNB1_p.S37C; B3901
YLDSGIHCG

SEQ ID NO: 23150 - protein, 10 aa, Homo sapiens
  AACR GENIE Results; CTNNB1_p.S37C; B3901
SYLDSGIHCG

SEQ ID NO: 23151 - protein, 8 aa, Homo sapiens
  AACR GENIE Results; CTNNB1_p.S37C; C0802
YLDSGIHC

SEQ ID NO: 23152 - protein, 11 aa, Homo sapiens
  AACR GENIE Results; CTNNB1_p.S37C; A3101
SYLDSGIHCGA

SEQ ID NO: 23153 - protein, 10 aa, Homo sapiens
  AACR GENIE Results; CTNNB1_p.S37C; A3001
SYLDSGIHCG

SEQ ID NO: 23154 - protein, 8 aa, Homo sapiens
  AACR GENIE Results; CTNNB1_p.S37C; C0501
YLDSGIHC

SEQ ID NO: 23155 - protein, 11 aa, Homo sapiens
  AACR GENIE Results; CTNNB1_p.S37C; A3303
SYLDSGIHCGA

SEQ ID NO: 23156 - protein, 10 aa, Homo sapiens
  AACR GENIE Results; CTNNB1_p.S37C; A2301
SYLDSGIHCG

SEQ ID NO: 23157 - protein, 9 aa, Homo sapiens
  AACR GENIE Results; CTNNB1_p.S37C; B1302
YLDSGIHCG

SEQ ID NO: 23158 - protein, 10 aa, Homo sapiens
  AACR GENIE Results; CTNNB1_p.S37C; A6802
YLDSGIHCGA

SEQ ID NO: 23159 - protein, 8 aa, Homo sapiens
  AACR GENIE Results; CTNNB1_p.S37C; A0201
YLDSGIHC

SEQ ID NO: 23160 - protein, 8 aa, Homo sapiens
  AACR GENIE Results; CTNNB1_p.S37C; A0201
LDSGIHCG

SEQ ID NO: 23161 - protein, 10 aa, Homo sapiens
  AACR GENIE Results; CTNNB1_p.S37C; A0101
YLDSGIHCGA

SEQ ID NO: 23162 - protein, 8 aa, Homo sapiens
  AACR GENIE Results; CTNNB1_p.S37C; B3901
YLDSGIHC

SEQ ID NO: 23163 - protein, 9 aa, Homo sapiens
  AACR GENIE Results; CTNNB1_p.S37C; B3901
SYLDSGIHC

SEQ ID NO: 23164 - protein, 11 aa, Homo sapiens
  AACR GENIE Results; CTNNB1_p.S37C; A0201
SYLDSGIHCGA

SEQ ID NO: 23165 - protein, 9 aa, Homo sapiens
  AACR GENIE Results; CTNNB1_p.S37C; A6802
LDSGIHCGA

SEQ ID NO: 23166 - protein, 11 aa, Homo sapiens
  AACR GENIE Results; CTNNB1_p.S37C; B2705
SYLDSGIHCGA

SEQ ID NO: 23167 - protein, 9 aa, Homo sapiens
  AACR GENIE Results; CTNNB1_p.S37F; A2301
SYLDSGIHF

SEQ ID NO: 23168 - protein, 9 aa, Homo sapiens
  AACR GENIE Results; CTNNB1_p.S37F; C1402
SYLDSGIHF

SEQ ID NO: 23169 - protein, 9 aa, Homo sapiens
  AACR GENIE Results; CTNNB1_p.S37F; A2402
SYLDSGIHF

SEQ ID NO: 23170 - protein, 8 aa, Homo sapiens
  AACR GENIE Results; CTNNB1_p.S37F; C0501
YLDSGIHF

SEQ ID NO: 23171 - protein, 8 aa, Homo sapiens
  AACR GENIE Results; CTNNB1_p.S37F; C0802
YLDSGIHF

SEQ ID NO: 23172 - protein, 8 aa, Homo sapiens
  AACR GENIE Results; CTNNB1_p.S37F; C1701
YLDSGIHF

SEQ ID NO: 23173 - protein, 8 aa, Homo sapiens
  AACR GENIE Results; CTNNB1_p.S37F; C0401
YLDSGIHF

SEQ ID NO: 23174 - protein, 10 aa, Homo sapiens
  AACR GENIE Results; CTNNB1_p.S37F; A0201
YLDSGIHFGA

SEQ ID NO: 23175 - protein, 9 aa, Homo sapiens
  AACR GENIE Results; CTNNB1_p.S37F; B3901
IHFGATTTA

SEQ ID NO: 23176 - protein, 8 aa, Homo sapiens
  AACR GENIE Results; CTNNB1_p.S37F; B5801
YLDSGIHF

SEQ ID NO: 23177 - protein, 10 aa, Homo sapiens
  AACR GENIE Results; CTNNB1_p.S37F; A3101
SYLDSGIHFG

SEQ ID NO: 23178 - protein, 8 aa, Homo sapiens
  AACR GENIE Results; CTNNB1_p.S37F; B3801
YLDSGIHF

SEQ ID NO: 23179 - protein, 8 aa, Homo sapiens
  AACR GENIE Results; CTNNB1_p.S37F; A0101
YLDSGIHF

SEQ ID NO: 23180 - protein, 9 aa, Homo sapiens
  AACR GENIE Results; CTNNB1_p.S37F; C0702
SYLDSGIHF

SEQ ID NO: 23181 - protein, 9 aa, Homo sapiens
  AACR GENIE Results; CTNNB1_p.S37F; A0201
YLDSGIHFG

SEQ ID NO: 23182 - protein, 11 aa, Homo sapiens
  AACR GENIE Results; CTNNB1_p.S37F; A3101
SYLDSGIHFGA

SEQ ID NO: 23183 - protein, 8 aa, Homo sapiens
  AACR GENIE Results; CTNNB1_p.S37F; C0202
YLDSGIHF

SEQ ID NO: 23184 - protein, 10 aa, Homo sapiens
  AACR GENIE Results; CTNNB1_p.S37F; B1501
GIHFGATTTA

SEQ ID NO: 23185 - protein, 10 aa, Homo sapiens
  AACR GENIE Results; CTNNB1_p.S37F; A6802
YLDSGIHFGA

SEQ ID NO: 23186 - protein, 10 aa, Homo sapiens
  AACR GENIE Results; CTNNB1_p.S37F; B3503
FGATTTAPSL

SEQ ID NO: 23187 - protein, 8 aa, Homo sapiens
  AACR GENIE Results; CTNNB1_p.S37F; A2301
YLDSGIHF

SEQ ID NO: 23188 - protein, 10 aa, Homo sapiens
  AACR GENIE Results; CTNNB1_p.S37F; B5801
QSYLDSGIHF

SEQ ID NO: 23189 - protein, 9 aa, Homo sapiens
  AACR GENIE Results; CTNNB1_p.S37F; A2902
SYLDSGIHF

SEQ ID NO: 23190 - protein, 10 aa, Homo sapiens
  AACR GENIE Results; CTNNB1_p.S37F; B5701
QSYLDSGIHF

SEQ ID NO: 23191 - protein, 9 aa, Homo sapiens
  AACR GENIE Results; CTNNB1_p.S37F; A6802
LDSGIHFGA

SEQ ID NO: 23192 - protein, 10 aa, Homo sapiens
  AACR GENIE Results; CTNNB1_p.S37F; A0205
GIHFGATTTA

SEQ ID NO: 23193 - protein, 8 aa, Homo sapiens
  AACR GENIE Results; CTNNB1_p.S37F; C0304
YLDSGIHF

SEQ ID NO: 23194 - protein, 8 aa, Homo sapiens
  AACR GENIE Results; CTNNB1_p.S37F; B3901
YLDSGIHF

SEQ ID NO: 23195 - protein, 9 aa, Homo sapiens
  AACR GENIE Results; CTNNB1_p.S37F; B3801
IHFGATTTA

SEQ ID NO: 23196 - protein, 10 aa, Homo sapiens
  AACR GENIE Results; CTNNB1_p.S37F; A2902
SYLDSGIHFG

SEQ ID NO: 23197 - protein, 10 aa, Homo sapiens
  AACR GENIE Results; CTNNB1_p.S37F; B2702
YLDSGIHFGA

SEQ ID NO: 23198 - protein, 8 aa, Homo sapiens
  AACR GENIE Results; CTNNB1_p.S37F; B3901
IHFGATTT

SEQ ID NO: 23199 - protein, 8 aa, Homo sapiens
  AACR GENIE Results; CTNNB1_p.S37F; C0801
YLDSGIHF

SEQ ID NO: 23200 - protein, 10 aa, Homo sapiens
  AACR GENIE Results; CTNNB1_p.S37F; B5001
GIHFGATTTA

SEQ ID NO: 23201 - protein, 10 aa, Homo sapiens
  AACR GENIE Results; CTNNB1_p.S37F; B4002
FGATTTAPSL

SEQ ID NO: 23202 - protein, 9 aa, Homo sapiens
  AACR GENIE Results; CTNNB1_p.S37F; A3303
SYLDSGIHF

SEQ ID NO: 23203 - protein, 10 aa, Homo sapiens
  AACR GENIE Results; CTNNB1_p.S37F; A3301
SYLDSGIHFG

SEQ ID NO: 23204 - protein, 10 aa, Homo sapiens
  AACR GENIE Results; CTNNB1_p.S37F; A3303
SYLDSGIHFG

SEQ ID NO: 23205 - protein, 10 aa, Homo sapiens
  AACR GENIE Results; CTNNB1_p.S37F; A2902
YLDSGIHFGA

SEQ ID NO: 23206 - protein, 9 aa, Homo sapiens
  AACR GENIE Results; CTNNB1_p.S37F; B1501
GIHFGATTT

SEQ ID NO: 23207 - protein, 9 aa, Homo sapiens
  AACR GENIE Results; CTNNB1_p.S37F; B3901
SYLDSGIHF

SEQ ID NO: 23208 - protein, 9 aa, Homo sapiens
  AACR GENIE Results; CTNNB1_p.S37F; B0801
DSGIHFGAT

SEQ ID NO: 23209 - protein, 10 aa, Homo sapiens
  AACR GENIE Results; CTNNB1_p.S37F; A0101
YLDSGIHFGA

SEQ ID NO: 23210 - protein, 11 aa, Homo sapiens
  AACR GENIE Results; CTNNB1_p.S37F; A3303
SYLDSGIHFGA

SEQ ID NO: 23211 - protein, 9 aa, Homo sapiens
  AACR GENIE Results; CTNNB1_p.S37F; B3801
SYLDSGIHF

SEQ ID NO: 23212 - protein, 9 aa, Homo sapiens
  AACR GENIE Results; CTNNB1_p.S37F; B1503
SYLDSGIHF

SEQ ID NO: 23213 - protein, 10 aa, Homo sapiens
  AACR GENIE Results; CTNNB1_p.S37F; B3901
IHFGATTTAP

SEQ ID NO: 23214 - protein, 8 aa, Homo sapiens
  AACR GENIE Results; CTNNB1_p.S37F; A6801
DSGIHFGA

SEQ ID NO: 23215 - protein, 10 aa, Homo sapiens
  AACR GENIE Results; CTNNB1_p.S37F; A2301
SYLDSGIHFG

SEQ ID NO: 23216 - protein, 10 aa, Homo sapiens
  AACR GENIE Results; CTNNB1_p.S37F; B1302
YLDSGIHFGA

SEQ ID NO: 23217 - protein, 10 aa, Homo sapiens
  AACR GENIE Results; CTNNB1_p.S37F; B1302
GIHFGATTTA

SEQ ID NO: 23218 - protein, 11 aa, Homo sapiens
  AACR GENIE Results; CTNNB1_p.S37F; A2902
SYLDSGIHFGA

SEQ ID NO: 23219 - protein, 8 aa, Homo sapiens
  AACR GENIE Results; CTNNB1_p.S37F; C0302
YLDSGIHF

SEQ ID NO: 23220 - protein, 8 aa, Homo sapiens
  AACR GENIE Results; CTNNB1_p.S37F; C0303
YLDSGIHF

SEQ ID NO: 23221 - protein, 9 aa, Homo sapiens
  AACR GENIE Results; CTNNB1_p.S37F; C0401
SYLDSGIHF

SEQ ID NO: 23222 - protein, 8 aa, Homo sapiens
  AACR GENIE Results; CTNNB1_p.S37F; A3301
DSGIHFGA

SEQ ID NO: 23223 - protein, 10 aa, Homo sapiens
  AACR GENIE Results; CTNNB1_p.S37F; A6802
LDSGIHFGAT

SEQ ID NO: 23224 - protein, 10 aa, Homo sapiens
  AACR GENIE Results; CTNNB1_p.S37F; B1501
QSYLDSGIHF

SEQ ID NO: 23225 - protein, 8 aa, Homo sapiens
  AACR GENIE Results; CTNNB1_p.S37F; B3501
YLDSGIHF

SEQ ID NO: 23226 - protein, 10 aa, Homo sapiens
  AACR GENIE Results; CTNNB1_p.S37F; A6801
QSYLDSGIHF

SEQ ID NO: 23227 - protein, 9 aa, Homo sapiens
  AACR GENIE Results; CTNNB1_p.S37F; B5001
IHFGATTTA

SEQ ID NO: 23228 - protein, 9 aa, Homo sapiens
  AACR GENIE Results; CTNNB1_p.S37F; B1501
SYLDSGIHF

SEQ ID NO: 23229 - protein, 9 aa, Homo sapiens
  AACR GENIE Results; CTNNB1_p.S37F; B5001
LDSGIHFGA

SEQ ID NO: 23230 - protein, 9 aa, Homo sapiens
  AACR GENIE Results; CTNNB1_p.S37F; B3701
LDSGIHFGA

SEQ ID NO: 23231 - protein, 9 aa, Homo sapiens
  AACR GENIE Results; CTNNB1_p.S37F; A3101
SYLDSGIHF

SEQ ID NO: 23232 - protein, 9 aa, Homo sapiens
  AACR GENIE Results; CTNNB1_p.S37F; A1101
DSGIHFGAT

SEQ ID NO: 23233 - protein, 9 aa, Homo sapiens
  AACR GENIE Results; CTNNB1_p.S45del; A0301
TTTAPLSGK

SEQ ID NO: 23234 - protein, 10 aa, Homo sapiens
  AACR GENIE Results; CTNNB1_p.S45del; A0301
ATTTAPLSGK

SEQ ID NO: 23235 - protein, 11 aa, Homo sapiens
  AACR GENIE Results; CTNNB1_p.S45del; A0301
GATTTAPLSGK

SEQ ID NO: 23236 - protein, 8 aa, Homo sapiens
  AACR GENIE Results; CTNNB1_p.S45del; A0301
TTAPLSGK

SEQ ID NO: 23237 - protein, 9 aa, Homo sapiens
  AACR GENIE Results; CTNNB1_p.S45del; B0702
SGATTTAPL

SEQ ID NO: 23238 - protein, 9 aa, Homo sapiens
  AACR GENIE Results; CTNNB1_p.S45F; A1101
TTAPFLSGK

SEQ ID NO: 23239 - protein, 9 aa, Homo sapiens
  AACR GENIE Results; CTNNB1_p.S45F; A6801
TTAPFLSGK

SEQ ID NO: 23240 - protein, 9 aa, Homo sapiens
  AACR GENIE Results; CTNNB1_p.S45F; A0301
TTAPFLSGK

SEQ ID NO: 23241 - protein, 11 aa, Homo sapiens
  AACR GENIE Results; CTNNB1_p.S45F; A1101
ATTTAPFLSGK

SEQ ID NO: 23242 - protein, 9 aa, Homo sapiens
  AACR GENIE Results; CTNNB1_p.S45F; C1701
GATTTAPFL

SEQ ID NO: 23243 - protein, 10 aa, Homo sapiens
  AACR GENIE Results; CTNNB1_p.S45F; A6801
TTTAPFLSGK

SEQ ID NO: 23244 - protein, 9 aa, Homo sapiens
  AACR GENIE Results; CTNNB1_p.S45F; C0304
GATTTAPFL

SEQ ID NO: 23245 - protein, 9 aa, Homo sapiens
  AACR GENIE Results; CTNNB1_p.S45F; A3303
TTAPFLSGK

SEQ ID NO: 23246 - protein, 9 aa, Homo sapiens
  AACR GENIE Results; CTNNB1_p.S45F; C0303
GATTTAPFL

SEQ ID NO: 23247 - protein, 10 aa, Homo sapiens
  AACR GENIE Results; CTNNB1_p.S45F; A0301
TTTAPFLSGK

SEQ ID NO: 23248 - protein, 10 aa, Homo sapiens
  AACR GENIE Results; CTNNB1_p.S45F; A1101
TTTAPFLSGK

SEQ ID NO: 23249 - protein, 9 aa, Homo sapiens
  AACR GENIE Results; CTNNB1_p.S45F; A6802
TTAPFLSGK

SEQ ID NO: 23250 - protein, 8 aa, Homo sapiens
  AACR GENIE Results; CTNNB1_p.S45F; B5801
ATTTAPFL

SEQ ID NO: 23251 - protein, 9 aa, Homo sapiens
  AACR GENIE Results; CTNNB1_p.S45F; B5801
GATTTAPFL

SEQ ID NO: 23252 - protein, 8 aa, Homo sapiens
  AACR GENIE Results; CTNNB1_p.S45F; C0304
ATTTAPFL

SEQ ID NO: 23253 - protein, 10 aa, Homo sapiens
  AACR GENIE Results; CTNNB1_p.S45F; A6802
TTAPFLSGKG

SEQ ID NO: 23254 - protein, 8 aa, Homo sapiens
  AACR GENIE Results; CTNNB1_p.S45F; C1502
ATTTAPFL

SEQ ID NO: 23255 - protein, 8 aa, Homo sapiens
  AACR GENIE Results; CTNNB1_p.S45F; B4002
ATTTAPFL

SEQ ID NO: 23256 - protein, 9 aa, Homo sapiens
  AACR GENIE Results; CTNNB1_p.S45F; B3503
GATTTAPFL

SEQ ID NO: 23257 - protein, 9 aa, Homo sapiens
  AACR GENIE Results; CTNNB1_p.S45F; A1101
ATTTAPFLS

SEQ ID NO: 23258 - protein, 11 aa, Homo sapiens
  AACR GENIE Results; CTNNB1_p.S45F; B3801
IHSGATTTAPF

SEQ ID NO: 23259 - protein, 9 aa, Homo sapiens
  AACR GENIE Results; CTNNB1_p.S45F; B5701
TTAPFLSGK

SEQ ID NO: 23260 - protein, 8 aa, Homo sapiens
  AACR GENIE Results; CTNNB1_p.S45F; C0303
ATTTAPFL

SEQ ID NO: 23261 - protein, 10 aa, Homo sapiens
  AACR GENIE Results; CTNNB1_p.S45F; A6802
TTTAPFLSGK

SEQ ID NO: 23262 - protein, 11 aa, Homo sapiens
  AACR GENIE Results; CTNNB1_p.S45F; A0301
ATTTAPFLSGK

SEQ ID NO: 23263 - protein, 9 aa, Homo sapiens
  AACR GENIE Results; CTNNB1_p.S45F; A3101
TTAPFLSGK

SEQ ID NO: 23264 - protein, 9 aa, Homo sapiens
  AACR GENIE Results; CTNNB1_p.S45F; B3501
SGATTTAPF

SEQ ID NO: 23265 - protein, 9 aa, Homo sapiens
  AACR GENIE Results; CTNNB1_p.S45F; A3303
TTTAPFLSG

SEQ ID NO: 23266 - protein, 8 aa, Homo sapiens
  AACR GENIE Results; CTNNB1_p.S45F; C1601
ATTTAPFL

SEQ ID NO: 23267 - protein, 9 aa, Homo sapiens
  AACR GENIE Results; CTNNB1_p.S45F; A6801
TTTAPFLSG

SEQ ID NO: 23268 - protein, 9 aa, Homo sapiens
  AACR GENIE Results; CTNNB1_p.S45F; B1302
GATTTAPFL

SEQ ID NO: 23269 - protein, 9 aa, Homo sapiens
  AACR GENIE Results; CTNNB1_p.S45F; A3001
TTAPFLSGK

SEQ ID NO: 23270 - protein, 10 aa, Homo sapiens
  AACR GENIE Results; CTNNB1_p.S45F; A6801
TTAPFLSGKG

SEQ ID NO: 23271 - protein, 9 aa, Homo sapiens
  AACR GENIE Results; CTNNB1_p.S45F; B1501
SGATTTAPF

SEQ ID NO: 23272 - protein, 9 aa, Homo sapiens
  AACR GENIE Results; CTNNB1_p.S45F; A3001
GATTTAPFL

SEQ ID NO: 23273 - protein, 10 aa, Homo sapiens
  AACR GENIE Results; CTNNB1_p.S45F; A3303
TTTAPFLSGK

SEQ ID NO: 23274 - protein, 11 aa, Homo sapiens
  AACR GENIE Results; CTNNB1_p.S45F; A6801
ATTTAPFLSGK

SEQ ID NO: 23275 - protein, 10 aa, Homo sapiens
  AACR GENIE Results; CTNNB1_p.S45F; A1101
ATTTAPFLSG

SEQ ID NO: 23276 - protein, 10 aa, Homo sapiens
  AACR GENIE Results; CTNNB1_p.S45F; A1101
SGATTTAPFL

SEQ ID NO: 23277 - protein, 10 aa, Homo sapiens
  AACR GENIE Results; CTNNB1_p.S45F; A2902
TTAPFLSGKG

SEQ ID NO: 23278 - protein, 8 aa, Homo sapiens
  AACR GENIE Results; CTNNB1_p.S45F; C1701
ATTTAPFL

SEQ ID NO: 23279 - protein, 8 aa, Homo sapiens
  AACR GENIE Results; CTNNB1_p.S45F; B5701
ATTTAPFL

SEQ ID NO: 23280 - protein, 9 aa, Homo sapiens
  AACR GENIE Results; CTNNB1_p.S45F; A6802
ATTTAPFLS

SEQ ID NO: 23281 - protein, 9 aa, Homo sapiens
  AACR GENIE Results; CTNNB1_p.S45F; B2702
TTAPFLSGK

SEQ ID NO: 23282 - protein, 8 aa, Homo sapiens
  AACR GENIE Results; CTNNB1_p.S45F; A3001
ATTTAPFL

SEQ ID NO: 23283 - protein, 8 aa, Homo sapiens
  AACR GENIE Results; CTNNB1_p.S45F; B1302
ATTTAPFL

SEQ ID NO: 23284 - protein, 8 aa, Homo sapiens
  AACR GENIE Results; CTNNB1_p.S45F; B0702
ATTTAPFL

SEQ ID NO: 23285 - protein, 9 aa, Homo sapiens
  AACR GENIE Results; CTNNB1_p.S45F; A3101
TTTAPFLSG

SEQ ID NO: 23286 - protein, 10 aa, Homo sapiens
  AACR GENIE Results; CTNNB1_p.S45F; A1101
TTAPFLSGKG

SEQ ID NO: 23287 - protein, 10 aa, Homo sapiens
  AACR GENIE Results; CTNNB1_p.S45F; A2601
TTAPFLSGKG

SEQ ID NO: 23288 - protein, 9 aa, Homo sapiens
  AACR GENIE Results; CTNNB1_p.S45F; B4002
GATTTAPFL

SEQ ID NO: 23289 - protein, 9 aa, Homo sapiens
  AACR GENIE Results; CTNNB1_p.S45F; A1101
TTTAPFLSG

SEQ ID NO: 23290 - protein, 9 aa, Homo sapiens
  AACR GENIE Results; CTNNB1_p.S45F; B4001
GATTTAPFL

SEQ ID NO: 23291 - protein, 10 aa, Homo sapiens
  AACR GENIE Results; CTNNB1_p.S45F; A6801
SGATTTAPFL

SEQ ID NO: 23292 - protein, 10 aa, Homo sapiens
  AACR GENIE Results; CTNNB1_p.S45F; A6802
SGATTTAPFL

SEQ ID NO: 23293 - protein, 9 aa, Homo sapiens
  AACR GENIE Results; CTNNB1_p.S45F; B3503
SGATTTAPF

SEQ ID NO: 23294 - protein, 10 aa, Homo sapiens
  AACR GENIE Results; CTNNB1_p.S45F; A0301
TTAPFLSGKG

SEQ ID NO: 23295 - protein, 8 aa, Homo sapiens
  AACR GENIE Results; CTNNB1_p.S45F; A1101
ATTTAPFL

SEQ ID NO: 23296 - protein, 9 aa, Homo sapiens
  AACR GENIE Results; CTNNB1_p.S45F; A2601
TTAPFLSGK

SEQ ID NO: 23297 - protein, 10 aa, Homo sapiens
  AACR GENIE Results; CTNNB1_p.S45F; B0702
APFLSGKGNP

SEQ ID NO: 23298 - protein, 9 aa, Homo sapiens
  AACR GENIE Results; CTNNB1_p.S45F; B3901
SGATTTAPF

SEQ ID NO: 23299 - protein, 8 aa, Homo sapiens
  AACR GENIE Results; CTNNB1_p.S45F; B0702
APFLSGKG

SEQ ID NO: 23300 - protein, 9 aa, Homo sapiens
  AACR GENIE Results; CTNNB1_p.S45F; C1601
GATTTAPFL

SEQ ID NO: 23301 - protein, 10 aa, Homo sapiens
  AACR GENIE Results; CTNNB1_p.S45F; A3303
TTAPFLSGKG

SEQ ID NO: 23302 - protein, 9 aa, Homo sapiens
  AACR GENIE Results; CTNNB1_p.S45F; B2705
TTAPFLSGK

SEQ ID NO: 23303 - protein, 9 aa, Homo sapiens
  AACR GENIE Results; CTNNB1_p.S45F; A3301
TTAPFLSGK

SEQ ID NO: 23304 - protein, 8 aa, Homo sapiens
  AACR GENIE Results; CTNNB1_p.S45F; B5101
TAPFLSGK

SEQ ID NO: 23305 - protein, 9 aa, Homo sapiens
  AACR GENIE Results; CTNNB1_p.S45F; A0201
GATTTAPFL

SEQ ID NO: 23306 - protein, 9 aa, Homo sapiens
  AACR GENIE Results; CTNNB1_p.S45F; A0205
GATTTAPFL

SEQ ID NO: 23307 - protein, 11 aa, Homo sapiens
  AACR GENIE Results; CTNNB1_p.S45F; A3101
ATTTAPFLSGK

SEQ ID NO: 23308 - protein, 9 aa, Homo sapiens
  AACR GENIE Results; CTNNB1_p.S45F; A3001
TTTAPFLSG

SEQ ID NO: 23309 - protein, 8 aa, Homo sapiens
  AACR GENIE Results; CTNNB1_p.S45F; A3101
ATTTAPFL

SEQ ID NO: 23310 - protein, 9 aa, Homo sapiens
  AACR GENIE Results; CTNNB1_p.S45F; A6802
TTTAPFLSG

SEQ ID NO: 23311 - protein, 9 aa, Homo sapiens
  AACR GENIE Results; CTNNB1_p.S45P; A0301
TTAPPLSGK

SEQ ID NO: 23312 - protein, 9 aa, Homo sapiens
  AACR GENIE Results; CTNNB1_p.S45P; A1101
TTAPPLSGK

SEQ ID NO: 23313 - protein, 9 aa, Homo sapiens
  AACR GENIE Results; CTNNB1_p.S45P; A6801
TTAPPLSGK

SEQ ID NO: 23314 - protein, 11 aa, Homo sapiens
  AACR GENIE Results; CTNNB1_p.S45P; A1101
ATTTAPPLSGK

SEQ ID NO: 23315 - protein, 10 aa, Homo sapiens
  AACR GENIE Results; CTNNB1_p.S45P; A0301
TTTAPPLSGK

SEQ ID NO: 23316 - protein, 10 aa, Homo sapiens
  AACR GENIE Results; CTNNB1_p.S45P; A1101
TTTAPPLSGK

SEQ ID NO: 23317 - protein, 11 aa, Homo sapiens
  AACR GENIE Results; CTNNB1_p.S45P; A0301
ATTTAPPLSGK

SEQ ID NO: 23318 - protein, 10 aa, Homo sapiens
  AACR GENIE Results; CTNNB1_p.S45P; A6801
TTTAPPLSGK

SEQ ID NO: 23319 - protein, 10 aa, Homo sapiens
  AACR GENIE Results; CTNNB1_p.S45P; A1101
TTAPPLSGKG

SEQ ID NO: 23320 - protein, 9 aa, Homo sapiens
  AACR GENIE Results; CTNNB1_p.S45P; C0304
GATTTAPPL

SEQ ID NO: 23321 - protein, 9 aa, Homo sapiens
  AACR GENIE Results; CTNNB1_p.S45P; A3101
TTAPPLSGK

SEQ ID NO: 23322 - protein, 9 aa, Homo sapiens
  AACR GENIE Results; CTNNB1_p.S45P; B5701
TTAPPLSGK

SEQ ID NO: 23323 - protein, 9 aa, Homo sapiens
  AACR GENIE Results; CTNNB1_p.S45P; C0303
GATTTAPPL

SEQ ID NO: 23324 - protein, 10 aa, Homo sapiens
  AACR GENIE Results; CTNNB1_p.S45P; A6801
TTAPPLSGKG

SEQ ID NO: 23325 - protein, 9 aa, Homo sapiens
  AACR GENIE Results; CTNNB1_p.S45P; B3501
TTAPPLSGK

SEQ ID NO: 23326 - protein, 11 aa, Homo sapiens
  AACR GENIE Results; CTNNB1_p.S45P; A6801
ATTTAPPLSGK

SEQ ID NO: 23327 - protein, 8 aa, Homo sapiens
  AACR GENIE Results; CTNNB1_p.S45P; C0303
ATTTAPPL

SEQ ID NO: 23328 - protein, 8 aa, Homo sapiens
  AACR GENIE Results; CTNNB1_p.S45P; C0304
ATTTAPPL

SEQ ID NO: 23329 - protein, 10 aa, Homo sapiens
  AACR GENIE Results; CTNNB1_p.S45P; A0301
TTAPPLSGKG

SEQ ID NO: 23330 - protein, 8 aa, Homo sapiens
  AACR GENIE Results; CTNNB1_p.S45P; B0702
ATTTAPPL

SEQ ID NO: 23331 - protein, 9 aa, Homo sapiens
  AACR GENIE Results; CTNNB1_p.S45P; A1101
ATTTAPPLS

SEQ ID NO: 23332 - protein, 10 aa, Homo sapiens
  AACR GENIE Results; CTNNB1_p.S45P; A2902
TTAPPLSGKG

SEQ ID NO: 23333 - protein, 10 aa, Homo sapiens
  AACR GENIE Results; CTNNB1_p.S45P; A1101
ATTTAPPLSG

SEQ ID NO: 23334 - protein, 9 aa, Homo sapiens
  AACR GENIE Results; CTNNB1_p.S45P; A2601
TTAPPLSGK

SEQ ID NO: 23335 - protein, 9 aa, Homo sapiens
  AACR GENIE Results; CTNNB1_p.S45P; A6801
TTTAPPLSG

SEQ ID NO: 23336 - protein, 9 aa, Homo sapiens
  AACR GENIE Results; CTNNB1_p.S45P; B3501
GATTTAPPL

SEQ ID NO: 23337 - protein, 8 aa, Homo sapiens
  AACR GENIE Results; CTNNB1_p.S45P; B5101
TAPPLSGK

SEQ ID NO: 23338 - protein, 10 aa, Homo sapiens
  AACR GENIE Results; CTNNB1_p.S45P; A2601
TTAPPLSGKG

SEQ ID NO: 23339 - protein, 10 aa, Homo sapiens
  AACR GENIE Results; CTNNB1_p.S45P; A3101
TTTAPPLSGK

SEQ ID NO: 23340 - protein, 9 aa, Homo sapiens
  AACR GENIE Results; CTNNB1_p.S45P; B1501
TTAPPLSGK

SEQ ID NO: 23341 - protein, 9 aa, Homo sapiens
  AACR GENIE Results; CTNNB1_p.S45P; B1501
GATTTAPPL

SEQ ID NO: 23342 - protein, 10 aa, Homo sapiens
  AACR GENIE Results; CTNNB1_p.S45P; A1101
SGATTTAPPL

SEQ ID NO: 23343 - protein, 10 aa, Homo sapiens
  AACR GENIE Results; CTNNB1_p.S45P; A6801
SGATTTAPPL

SEQ ID NO: 23344 - protein, 9 aa, Homo sapiens
  AACR GENIE Results; CTNNB1_p.S45P; A6801
GATTTAPPL

SEQ ID NO: 23345 - protein, 9 aa, Homo sapiens
  AACR GENIE Results; CTNNB1_p.S45P; B0702
TTAPPLSGK

SEQ ID NO: 23346 - protein, 8 aa, Homo sapiens
  AACR GENIE Results; CTNNB1_p.S45P; C1601
ATTTAPPL

SEQ ID NO: 23347 - protein, 9 aa, Homo sapiens
  AACR GENIE Results; CTNNB1_p.S45P; A1101
GATTTAPPL

SEQ ID NO: 23348 - protein, 9 aa, Homo sapiens
  AACR GENIE Results; CTNNB1_p.S45P; A3101
TTTAPPLSG

SEQ ID NO: 23349 - protein, 9 aa, Homo sapiens
  AACR GENIE Results; CTNNB1_p.S45P; B0702
GATTTAPPL

SEQ ID NO: 23350 - protein, 8 aa, Homo sapiens
  AACR GENIE Results; CTNNB1_p.S45P; B1501
ATTTAPPL

SEQ ID NO: 23351 - protein, 9 aa, Homo sapiens
  AACR GENIE Results; CTNNB1_p.S45P; B4001
GATTTAPPL

SEQ ID NO: 23352 - protein, 9 aa, Homo sapiens
  AACR GENIE Results; CTNNB1_p.S45Y; A1101
TTAPYLSGK

SEQ ID NO: 23353 - protein, 9 aa, Homo sapiens
  AACR GENIE Results; CTNNB1_p.S45Y; A0301
TTAPYLSGK

SEQ ID NO: 23354 - protein, 11 aa, Homo sapiens
  AACR GENIE Results; CTNNB1_p.S45Y; A1101
ATTTAPYLSGK

SEQ ID NO: 23355 - protein, 9 aa, Homo sapiens
  AACR GENIE Results; CTNNB1_p.S45Y; C0304
GATTTAPYL

SEQ ID NO: 23356 - protein, 9 aa, Homo sapiens
  AACR GENIE Results; CTNNB1_p.S45Y; B3501
SGATTTAPY

SEQ ID NO: 23357 - protein, 10 aa, Homo sapiens
  AACR GENIE Results; CTNNB1_p.S45Y; A1101
TTTAPYLSGK

SEQ ID NO: 23358 - protein, 8 aa, Homo sapiens
  AACR GENIE Results; CTNNB1_p.S45Y; C0304
ATTTAPYL

SEQ ID NO: 23359 - protein, 10 aa, Homo sapiens
  AACR GENIE Results; CTNNB1_p.S45Y; A0301
TTTAPYLSGK

SEQ ID NO: 23360 - protein, 11 aa, Homo sapiens
  AACR GENIE Results; CTNNB1_p.S45Y; A0301
ATTTAPYLSGK

SEQ ID NO: 23361 - protein, 10 aa, Homo sapiens
  AACR GENIE Results; CTNNB1_p.S45Y; A1101
TTAPYLSGKG

SEQ ID NO: 23362 - protein, 8 aa, Homo sapiens
  AACR GENIE Results; CTNNB1_p.S45Y; B0702
ATTTAPYL

SEQ ID NO: 23363 - protein, 10 aa, Homo sapiens
  AACR GENIE Results; CTNNB1_p.S45Y; A0301
TTAPYLSGKG

SEQ ID NO: 23364 - protein, 9 aa, Homo sapiens
  AACR GENIE Results; CTNNB1_p.S45Y; A1101
ATTTAPYLS

SEQ ID NO: 23365 - protein, 10 aa, Homo sapiens
  AACR GENIE Results; CTNNB1_p.S45Y; A1101
ATTTAPYLSG

SEQ ID NO: 23366 - protein, 9 aa, Homo sapiens
  AACR GENIE Results; CTNNB1_p.S45Y; A0201
GATTTAPYL

SEQ ID NO: 23367 - protein, 10 aa, Homo sapiens
  AACR GENIE Results; CTNNB1_p.S45Y; A1101
SGATTTAPYL

SEQ ID NO: 23368 - protein, 10 aa, Homo sapiens
  AACR GENIE Results; CTNNB1_p.S45Y; B0702
APYLSGKGNP

SEQ ID NO: 23369 - protein, 8 aa, Homo sapiens
  AACR GENIE Results; CTNNB1_p.S45Y; A1101
ATTTAPYL

SEQ ID NO: 23370 - protein, 8 aa, Homo sapiens
  AACR GENIE Results; CTNNB1_p.S45Y; B0702
APYLSGKG

SEQ ID NO: 23371 - protein, 9 aa, Homo sapiens
  AACR GENIE Results; CTNNB1_p.S45Y; B3501
GATTTAPYL

SEQ ID NO: 23372 - protein, 9 aa, Homo sapiens
  AACR GENIE Results; CTNNB1_p.S45Y; B3501
TTAPYLSGK

SEQ ID NO: 23373 - protein, 9 aa, Homo sapiens
  AACR GENIE Results; CTNNB1_p.S45Y; A1101
GATTTAPYL

SEQ ID NO: 23374 - protein, 11 aa, Homo sapiens
  AACR GENIE Results; CTNNB1_p.S45Y; A1101
SGATTTAPYLS

SEQ ID NO: 23375 - protein, 10 aa, Homo sapiens
  AACR GENIE Results; CTNNB1_p.S45Y; B3501
HSGATTTAPY

SEQ ID NO: 23376 - protein, 8 aa, Homo sapiens
  AACR GENIE Results; CTNNB1_p.S45Y; A1101
TAPYLSGK

SEQ ID NO: 23377 - protein, 9 aa, Homo sapiens
  AACR GENIE Results; CTNNB1_p.S45Y; A1101
SGATTTAPY

SEQ ID NO: 23378 - protein, 9 aa, Homo sapiens
  AACR GENIE Results; CTNNB1_p.T41A; A0301
ATAPSLSGK

SEQ ID NO: 23379 - protein, 9 aa, Homo sapiens
  AACR GENIE Results; CTNNB1_p.T41A; A1101
ATAPSLSGK

SEQ ID NO: 23380 - protein, 11 aa, Homo sapiens
  AACR GENIE Results; CTNNB1_p.T41A; A1101
ATATAPSLSGK

SEQ ID NO: 23381 - protein, 11 aa, Homo sapiens
  AACR GENIE Results; CTNNB1_p.T41A; A0301
ATATAPSLSGK

SEQ ID NO: 23382 - protein, 9 aa, Homo sapiens
  AACR GENIE Results; CTNNB1_p.T41A; C0304
GATATAPSL

SEQ ID NO: 23383 - protein, 9 aa, Homo sapiens
  AACR GENIE Results; CTNNB1_p.T41A; C0303
GATATAPSL

SEQ ID NO: 23384 - protein, 9 aa, Homo sapiens
  AACR GENIE Results; CTNNB1_p.T41A; B3503
GATATAPSL

SEQ ID NO: 23385 - protein, 9 aa, Homo sapiens
  AACR GENIE Results; CTNNB1_p.T41A; B3901
IHSGATATA

SEQ ID NO: 23386 - protein, 10 aa, Homo sapiens
  AACR GENIE Results; CTNNB1_p.T41A; A6801
TATAPSLSGK

SEQ ID NO: 23387 - protein, 9 aa, Homo sapiens
  AACR GENIE Results; CTNNB1_p.T41A; B5801
GATATAPSL

SEQ ID NO: 23388 - protein, 11 aa, Homo sapiens
  AACR GENIE Results; CTNNB1_p.T41A; A6801
ATATAPSLSGK

SEQ ID NO: 23389 - protein, 8 aa, Homo sapiens
  AACR GENIE Results; CTNNB1_p.T41A; B5801
ATATAPSL

SEQ ID NO: 23390 - protein, 8 aa, Homo sapiens
  AACR GENIE Results; CTNNB1_p.T41A; C0303
ATATAPSL

SEQ ID NO: 23391 - protein, 9 aa, Homo sapiens
  AACR GENIE Results; CTNNB1_p.T41A; A6801
ATAPSLSGK

SEQ ID NO: 23392 - protein, 10 aa, Homo sapiens
  AACR GENIE Results; CTNNB1_p.T41A; B3901
IHSGATATAP

SEQ ID NO: 23393 - protein, 8 aa, Homo sapiens
  AACR GENIE Results; CTNNB1_p.T41A; C0304
ATATAPSL

SEQ ID NO: 23394 - protein, 8 aa, Homo sapiens
  AACR GENIE Results; CTNNB1_p.T41A; B3901
ATATAPSL

SEQ ID NO: 23395 - protein, 8 aa, Homo sapiens
  AACR GENIE Results; CTNNB1_p.T41A; B4002
ATATAPSL

SEQ ID NO: 23396 - protein, 10 aa, Homo sapiens
  AACR GENIE Results; CTNNB1_p.T41A; A1101
ATATAPSLSG

SEQ ID NO: 23397 - protein, 9 aa, Homo sapiens
  AACR GENIE Results; CTNNB1_p.T41A; B4002
GATATAPSL

SEQ ID NO: 23398 - protein, 9 aa, Homo sapiens
  AACR GENIE Results; CTNNB1_p.T41A; B1302
GATATAPSL

SEQ ID NO: 23399 - protein, 8 aa, Homo sapiens
  AACR GENIE Results; CTNNB1_p.T41A; C1601
ATATAPSL

SEQ ID NO: 23400 - protein, 11 aa, Homo sapiens
  AACR GENIE Results; CTNNB1_p.T41A; B2702
ATATAPSLSGK

SEQ ID NO: 23401 - protein, 9 aa, Homo sapiens
  AACR GENIE Results; CTNNB1_p.T41A; B3801
IHSGATATA

SEQ ID NO: 23402 - protein, 9 aa, Homo sapiens
  AACR GENIE Results; CTNNB1_p.T41A; A3001
GATATAPSL

SEQ ID NO: 23403 - protein, 10 aa, Homo sapiens
  AACR GENIE Results; CTNNB1_p.T41A; A1101
ATAPSLSGKG

SEQ ID NO: 23404 - protein, 8 aa, Homo sapiens
  AACR GENIE Results; CTNNB1_p.T41A; B3901
IHSGATAT

SEQ ID NO: 23405 - protein, 9 aa, Homo sapiens
  AACR GENIE Results; CTNNB1_p.T41A; A0205
SGIHSGATA

SEQ ID NO: 23406 - protein, 10 aa, Homo sapiens
  AACR GENIE Results; CTNNB1_p.T41A; B5001
GIHSGATATA

SEQ ID NO: 23407 - protein, 9 aa, Homo sapiens
  AACR GENIE Results; CTNNB1_p.T41A; A1101
ATATAPSLS

SEQ ID NO: 23408 - protein, 9 aa, Homo sapiens
  AACR GENIE Results; CTNNB1_p.T41A; C1701
GATATAPSL

SEQ ID NO: 23409 - protein, 9 aa, Homo sapiens
  AACR GENIE Results; CTNNB1_p.T41A; B3501
GATATAPSL

SEQ ID NO: 23410 - protein, 10 aa, Homo sapiens
  AACR GENIE Results; CTNNB1_p.T41A; A0301
TATAPSLSGK

SEQ ID NO: 23411 - protein, 8 aa, Homo sapiens
  AACR GENIE Results; CTNNB1_p.T41A; A3001
ATATAPSL

SEQ ID NO: 23412 - protein, 8 aa, Homo sapiens
  AACR GENIE Results; CTNNB1_p.T41A; B1501
ATATAPSL

SEQ ID NO: 23413 - protein, 8 aa, Homo sapiens
  AACR GENIE Results; CTNNB1_p.T41A; B0702
ATATAPSL

SEQ ID NO: 23414 - protein, 10 aa, Homo sapiens
  AACR GENIE Results; CTNNB1_p.T41A; A1101
TATAPSLSGK

SEQ ID NO: 23415 - protein, 10 aa, Homo sapiens
  AACR GENIE Results; CTNNB1_p.T41A; A0205
GIHSGATATA

SEQ ID NO: 23416 - protein, 10 aa, Homo sapiens
  AACR GENIE Results; CTNNB1_p.T41A; B2702
TATAPSLSGK

SEQ ID NO: 23417 - protein, 9 aa, Homo sapiens
  AACR GENIE Results; CTNNB1_p.T41A; B0702
GATATAPSL

SEQ ID NO: 23418 - protein, 9 aa, Homo sapiens
  AACR GENIE Results; CTNNB1_p.T41A; A3001
ATAPSLSGK

SEQ ID NO: 23419 - protein, 9 aa, Homo sapiens
  AACR GENIE Results; CTNNB1_p.T41A; B3502
GATATAPSL

SEQ ID NO: 23420 - protein, 10 aa, Homo sapiens
  AACR GENIE Results; CTNNB1_p.T41A; A3303
TATAPSLSGK

SEQ ID NO: 23421 - protein, 9 aa, Homo sapiens
  AACR GENIE Results; CTNNB1_p.T41A; A3101
ATAPSLSGK

SEQ ID NO: 23422 - protein, 9 aa, Homo sapiens
  AACR GENIE Results; CTNNB1_p.T41A; C1601
GATATAPSL

SEQ ID NO: 23423 - protein, 9 aa, Homo sapiens
  AACR GENIE Results; CTNNB1_p.T41A; B1501
GATATAPSL

SEQ ID NO: 23424 - protein, 10 aa, Homo sapiens
  AACR GENIE Results; CTNNB1_p.T41A; B4002
SGATATAPSL

SEQ ID NO: 23425 - protein, 9 aa, Homo sapiens
  AACR GENIE Results; CTNNB1_p.T41A; B1501
GIHSGATAT

SEQ ID NO: 23426 - protein, 9 aa, Homo sapiens
  AACR GENIE Results; CTNNB1_p.T41A; B4001
GATATAPSL

SEQ ID NO: 23427 - protein, 9 aa, Homo sapiens
  AACR GENIE Results; CTNNB1_p.T41A; B3901
GATATAPSL

SEQ ID NO: 23428 - protein, 8 aa, Homo sapiens
  AACR GENIE Results; CTNNB1_p.T41A; B1302
ATATAPSL

SEQ ID NO: 23429 - protein, 8 aa, Homo sapiens
  AACR GENIE Results; CTNNB1_p.T41A; C1402
ATATAPSL

SEQ ID NO: 23430 - protein, 11 aa, Homo sapiens
  AACR GENIE Results; CTNNB1_p.T41A; A3101
ATATAPSLSGK

SEQ ID NO: 23431 - protein, 10 aa, Homo sapiens
  AACR GENIE Results; CTNNB1_p.T41A; A0301
ATATAPSLSG

SEQ ID NO: 23432 - protein, 10 aa, Homo sapiens
  AACR GENIE Results; CTNNB1_p.T41A; B1501
GIHSGATATA

SEQ ID NO: 23433 - protein, 8 aa, Homo sapiens
  AACR GENIE Results; CTNNB1_p.T41A; B4001
ATATAPSL

SEQ ID NO: 23434 - protein, 9 aa, Homo sapiens
  AACR GENIE Results; CTNNB1_p.T41A; A0205
GATATAPSL

SEQ ID NO: 23435 - protein, 10 aa, Homo sapiens
  AACR GENIE Results; CTNNB1_p.T41A; A6802
TATAPSLSGK

SEQ ID NO: 23436 - protein, 9 aa, Homo sapiens
  AACR GENIE Results; CTNNB1_p.T41A; B3501
TATAPSLSG

SEQ ID NO: 23437 - protein, 9 aa, Homo sapiens
  AACR GENIE Results; CTNNB1_p.T41A; A0301
ATATAPSLS

SEQ ID NO: 23438 - protein, 8 aa, Homo sapiens
  AACR GENIE Results; CTNNB1_p.T41A; C0102
ATATAPSL

SEQ ID NO: 23439 - protein, 9 aa, Homo sapiens
  AACR GENIE Results; CTNNB1_p.T41A; B5001
SGIHSGATA

SEQ ID NO: 23440 - protein, 11 aa, Homo sapiens
  AACR GENIE Results; CTNNB1_p.T41A; A0205
SGIHSGATATA

SEQ ID NO: 23441 - protein, 8 aa, Homo sapiens
  AACR GENIE Results; CTNNB1_p.T41A; B3701
ATATAPSL

SEQ ID NO: 23442 - protein, 9 aa, Homo sapiens
  AACR GENIE Results; CTNNB1_p.T41A; A0201
GATATAPSL

SEQ ID NO: 23443 - protein, 8 aa, Homo sapiens
  AACR GENIE Results; CTNNB1_p.T41A; B5701
ATATAPSL

SEQ ID NO: 23444 - protein, 9 aa, Homo sapiens
  AACR GENIE Results; CTNNB1_p.T41A; B0702
TATAPSLSG

SEQ ID NO: 23445 - protein, 9 aa, Homo sapiens
  AACR GENIE Results; CTNNB1_p.T41A; B2705
ATAPSLSGK

SEQ ID NO: 23446 - protein, 10 aa, Homo sapiens
  AACR GENIE Results; CTNNB1_p.T41A; A0301
ATAPSLSGKG

SEQ ID NO: 23447 - protein, 9 aa, Homo sapiens
  AACR GENIE Results; CTNNB1_p.T41A; A3001
TATAPSLSG

SEQ ID NO: 23448 - protein, 8 aa, Homo sapiens
  AACR GENIE Results; CTNNB1_p.T41A; C1502
ATATAPSL

SEQ ID NO: 23449 - protein, 9 aa, Homo sapiens
  AACR GENIE Results; CTNNB1_p.T41A; B1302
GIHSGATAT

SEQ ID NO: 23450 - protein, 9 aa, Homo sapiens
  AACR GENIE Results; CTNNB1_p.T41A; A6802
ATAPSLSGK

SEQ ID NO: 23451 - protein, 9 aa, Homo sapiens
  AACR GENIE Results; CTNNB1_p.T41A; A0201
ATAPSLSGK

SEQ ID NO: 23452 - protein, 11 aa, Homo sapiens
  AACR GENIE Results; CTNNB1_p.T41A; A6801
TATAPSLSGKG

SEQ ID NO: 23453 - protein, 10 aa, Homo sapiens
  AACR GENIE Results; CTNNB1_p.T41A; A2601
ATAPSLSGKG

SEQ ID NO: 23454 - protein, 10 aa, Homo sapiens
  AACR GENIE Results; CTNNB1_p.T41A; B1302
GIHSGATATA

SEQ ID NO: 23455 - protein, 9 aa, Homo sapiens
  AACR GENIE Results; CTNNB1_p.T41A; B5701
ATAPSLSGK

SEQ ID NO: 23456 - protein, 8 aa, Homo sapiens
  AACR GENIE Results; CTNNB1_p.T41A; C1701
ATATAPSL

SEQ ID NO: 23457 - protein, 9 aa, Homo sapiens
  AACR GENIE Results; CTNNB1_p.T41A; C1203
GATATAPSL

SEQ ID NO: 23458 - protein, 11 aa, Homo sapiens
  AACR GENIE Results; CTNNB1_p.T41A; A6802
ATATAPSLSGK

SEQ ID NO: 23459 - protein, 11 aa, Homo sapiens
  AACR GENIE Results; CUX1_p.T748I; B1501
SISPMPTVSSY

SEQ ID NO: 23460 - protein, 9 aa, Homo sapiens
  AACR GENIE Results; CUX1_p.T748I; A0201
ILTPKLLSI

SEQ ID NO: 23461 - protein, 11 aa, Homo sapiens
  AACR GENIE Results; CUX1_p.T748I; A0201
KLLSISPMPTV

SEQ ID NO: 23462 - protein, 10 aa, Homo sapiens
  AACR GENIE Results; CUX1_p.T748I; B1501
ISPMPTVSSY

SEQ ID NO: 23463 - protein, 9 aa, Homo sapiens
  AACR GENIE Results; CUX1_p.T748I; B5101
LSISPMPTV

SEQ ID NO: 23464 - protein, 10 aa, Homo sapiens
  AACR GENIE Results; CUX1_p.T748I; A0201
KLLSISPMPT

SEQ ID NO: 23465 - protein, 9 aa, Homo sapiens
  AACR GENIE Results; CUX1_p.V545I; B1302
SQSESAGSI

SEQ ID NO: 23466 - protein, 9 aa, Homo sapiens
  AACR GENIE Results; CUX1_p.V545I; B1501
GSISEGEEM

SEQ ID NO: 23467 - protein, 11 aa, Homo sapiens
  AACR GENIE Results; CUX1_p.V545I; B0702
SPSQSESAGSI

SEQ ID NO: 23468 - protein, 10 aa, Homo sapiens
  AACR GENIE Results; DAXX_p.R299Q; B4002
VEKAAAQHSL

SEQ ID NO: 23469 - protein, 10 aa, Homo sapiens
  AACR GENIE Results; DAXX_p.R299Q; A3001
VEKAAAQHSL

SEQ ID NO: 23470 - protein, 9 aa, Homo sapiens
  AACR GENIE Results; DAXX_p.R299Q; A3101
AQHSLGLPR

SEQ ID NO: 23471 - protein, 10 aa, Homo sapiens
  AACR GENIE Results; DAXX_p.R299Q; A1101
AAQHSLGLPR

SEQ ID NO: 23472 - protein, 10 aa, Homo sapiens
  AACR GENIE Results; DAXX_p.R299Q; B2702
AAQHSLGLPR

SEQ ID NO: 23473 - protein, 9 aa, Homo sapiens
  AACR GENIE Results; DAXX_p.R299Q; C1602
AAAQHSLGL

SEQ ID NO: 23474 - protein, 9 aa, Homo sapiens
  AACR GENIE Results; DAXX_p.R299Q; B3901
EKAAAQHSL

SEQ ID NO: 23475 - protein, 10 aa, Homo sapiens
  AACR GENIE Results; DAXX_p.R299Q; B4001
VEKAAAQHSL

SEQ ID NO: 23476 - protein, 9 aa, Homo sapiens
  AACR GENIE Results; DAXX_p.R299Q; C0304
AAAQHSLGL

SEQ ID NO: 23477 - protein, 9 aa, Homo sapiens
  AACR GENIE Results; DAXX_p.R299Q; A1101
AQHSLGLPR

SEQ ID NO: 23478 - protein, 9 aa, Homo sapiens
  AACR GENIE Results; DAXX_p.R299Q; C1502
AAAQHSLGL

SEQ ID NO: 23479 - protein, 10 aa, Homo sapiens
  AACR GENIE Results; DAXX_p.R299Q; A3101
AAQHSLGLPR

SEQ ID NO: 23480 - protein, 9 aa, Homo sapiens
  AACR GENIE Results; DAXX_p.R299Q; A0301
AQHSLGLPR

SEQ ID NO: 23481 - protein, 10 aa, Homo sapiens
  AACR GENIE Results; DDB2_p.Q265K; A1101
ATASVDKTVK

SEQ ID NO: 23482 - protein, 8 aa, Homo sapiens
  AACR GENIE Results; DDB2_p.Q265K; C0501
SVDKTVKI

SEQ ID NO: 23483 - protein, 10 aa, Homo sapiens
  AACR GENIE Results; DDB2_p.Q265K; A0301
ATASVDKTVK

SEQ ID NO: 23484 - protein, 9 aa, Homo sapiens
  AACR GENIE Results; DDB2_p.Q265K; A0301
FLATASVDK

SEQ ID NO: 23485 - protein, 8 aa, Homo sapiens
  AACR GENIE Results; DDR2_p.I488M; B1501
YQEPSRLM

SEQ ID NO: 23486 - protein, 8 aa, Homo sapiens
  AACR GENIE Results; DDR2_p.L232F; C0501
FTDGVSGL

SEQ ID NO: 23487 - protein, 9 aa, Homo sapiens
  AACR GENIE Results; DDR2_p.L232F; A0201
GLGQFTDGV

SEQ ID NO: 23488 - protein, 10 aa, Homo sapiens
  AACR GENIE Results; DDR2_p.L232F; A0101
YSMTEGLGQF

SEQ ID NO: 23489 - protein, 8 aa, Homo sapiens
  AACR GENIE Results; DDR2_p.L232F; C0401
FTDGVSGL

SEQ ID NO: 23490 - protein, 11 aa, Homo sapiens
  AACR GENIE Results; DDR2_p.L232F; C0501
FTDGVSGLDDF

SEQ ID NO: 23491 - protein, 11 aa, Homo sapiens
  AACR GENIE Results; DDR2_p.L232F; A0101
FTDGVSGLDDF

SEQ ID NO: 23492 - protein, 9 aa, Homo sapiens
  AACR GENIE Results; DDR2_p.L232F; A0201
SMTEGLGQF

SEQ ID NO: 23493 - protein, 10 aa, Homo sapiens
  AACR GENIE Results; DDR2_p.L232F; A1101
YSMTEGLGQF

SEQ ID NO: 23494 - protein, 10 aa, Homo sapiens
  AACR GENIE Results; DDR2_p.L232F; A0201
SMTEGLGQFT

SEQ ID NO: 23495 - protein, 10 aa, Homo sapiens
  AACR GENIE Results; DDR2_p.L232F; A0201
GQFTDGVSGL

SEQ ID NO: 23496 - protein, 9 aa, Homo sapiens
  AACR GENIE Results; DDR2_p.L232F; A2402
SMTEGLGQF

SEQ ID NO: 23497 - protein, 8 aa, Homo sapiens
  AACR GENIE Results; DDR2_p.L232F; C0401
MTEGLGQF

SEQ ID NO: 23498 - protein, 8 aa, Homo sapiens
  AACR GENIE Results; DDR2_p.L232F; C0304
FTDGVSGL

SEQ ID NO: 23499 - protein, 8 aa, Homo sapiens
  AACR GENIE Results; DDR2_p.L232F; C0501
MTEGLGQF

SEQ ID NO: 23500 - protein, 9 aa, Homo sapiens
  AACR GENIE Results; DDR2_p.R668H; A0301
GDLNQFLSH

SEQ ID NO: 23501 - protein, 9 aa, Homo sapiens
  AACR GENIE Results; DDR2_p.R668H; A1101
GDLNQFLSH

SEQ ID NO: 23502 - protein, 9 aa, Homo sapiens
  AACR GENIE Results; DDR2_p.V250L; A0201
HLWPGYDYV

SEQ ID NO: 23503 - protein, 10 aa, Homo sapiens
  AACR GENIE Results; DICER1_p.K228N; A1101
KIQKLENILK

SEQ ID NO: 23504 - protein, 10 aa, Homo sapiens
  AACR GENIE Results; DICER1_p.K228N; A0301
KIQKLENILK

SEQ ID NO: 23505 - protein, 9 aa, Homo sapiens
  AACR GENIE Results; DICER1_p.P762S; C0602
SRPDQPCYL

SEQ ID NO: 23506 - protein, 9 aa, Homo sapiens
  AACR GENIE Results; DICER1_p.P762S; B1501
YSRPDQPCY

SEQ ID NO: 23507 - protein, 9 aa, Homo sapiens
  AACR GENIE Results; DICER1_p.P762S; C0202
YSRPDQPCY

SEQ ID NO: 23508 - protein, 9 aa, Homo sapiens
  AACR GENIE Results; DICER1_p.P762S; A0101
YSRPDQPCY

SEQ ID NO: 23509 - protein, 9 aa, Homo sapiens
  AACR GENIE Results; DICER1_p.P762S; C1601
YSRPDQPCY

SEQ ID NO: 23510 - protein, 9 aa, Homo sapiens
  AACR GENIE Results; DICER1_p.P762S; A2601
YSRPDQPCY

SEQ ID NO: 23511 - protein, 9 aa, Homo sapiens
  AACR GENIE Results; DICER1_p.P762S; B3501
YSRPDQPCY

SEQ ID NO: 23512 - protein, 9 aa, Homo sapiens
  AACR GENIE Results; DIS3_p.D488Y; A0201
GCTDIDYAL

SEQ ID NO: 23513 - protein, 8 aa, Homo sapiens
  AACR GENIE Results; DIS3_p.G188V; B1801
IEEVIPAF

SEQ ID NO: 23514 - protein, 11 aa, Homo sapiens
  AACR GENIE Results; DIS3_p.G188V; A2601
EVIPAFTCEEY

SEQ ID NO: 23515 - protein, 10 aa, Homo sapiens
  AACR GENIE Results; DIS3_p.G188V; B1501
VIPAFTCEEY

SEQ ID NO: 23516 - protein, 9 aa, Homo sapiens
  AACR GENIE Results; DIS3_p.G188V; B1501
AIEEVIPAF

SEQ ID NO: 23517 - protein, 10 aa, Homo sapiens
  AACR GENIE Results; DIS3_p.G188V; B5701
KAIEEVIPAF

SEQ ID NO: 23518 - protein, 10 aa, Homo sapiens
  AACR GENIE Results; DIS3_p.G188V; B3501
KAIEEVIPAF

SEQ ID NO: 23519 - protein, 9 aa, Homo sapiens
  AACR GENIE Results; DIS3_p.G188V; A2601
AIEEVIPAF

SEQ ID NO: 23520 - protein, 9 aa, Homo sapiens
  AACR GENIE Results; DIS3_p.G188V; B3501
AIEEVIPAF

SEQ ID NO: 23521 - protein, 9 aa, Homo sapiens
  AACR GENIE Results; DIS3_p.G188V; B4001
KEKAIEEVI

SEQ ID NO: 23522 - protein, 10 aa, Homo sapiens
  AACR GENIE Results; DIS3_p.G188V; B1501
KAIEEVIPAF

SEQ ID NO: 23523 - protein, 9 aa, Homo sapiens
  AACR GENIE Results; DIS3_p.K535N; B3901
NRIDMVPEL

SEQ ID NO: 23524 - protein, 9 aa, Homo sapiens
  AACR GENIE Results; DIS3_p.K535N; B1401
NRIDMVPEL

SEQ ID NO: 23525 - protein, 9 aa, Homo sapiens
  AACR GENIE Results; DIS3_p.K535N; C0602
NRIDMVPEL

SEQ ID NO: 23526 - protein, 9 aa, Homo sapiens
  AACR GENIE Results; DIS3_p.K535N; B2705
NRIDMVPEL

SEQ ID NO: 23527 - protein, 9 aa, Homo sapiens
  AACR GENIE Results; DIS3_p.K535N; B3801
NRIDMVPEL

SEQ ID NO: 23528 - protein, 9 aa, Homo sapiens
  AACR GENIE Results; DIS3_p.K535N; A6801
TTVYLCENR

SEQ ID NO: 23529 - protein, 9 aa, Homo sapiens
  AACR GENIE Results; DIS3_p.K535N; C0702
NRIDMVPEL

SEQ ID NO: 23530 - protein, 9 aa, Homo sapiens
  AACR GENIE Results; DIS3_p.K535N; A3303
TTVYLCENR

SEQ ID NO: 23531 - protein, 9 aa, Homo sapiens
  AACR GENIE Results; DIS3_p.K535N; B3503
NRIDMVPEL

SEQ ID NO: 23532 - protein, 9 aa, Homo sapiens
  AACR GENIE Results; DNMT1_p.R1401W; B5701
QSWFQRQLW

SEQ ID NO: 23533 - protein, 11 aa, Homo sapiens
  AACR GENIE Results; DNMT3A_p.I780T; A0201
VMTDAKEVSAA

SEQ ID NO: 23534 - protein, 10 aa, Homo sapiens
  AACR GENIE Results; DNMT3A_p.I780T; A0201
VMTDAKEVSA

SEQ ID NO: 23535 - protein, 9 aa, Homo sapiens
  AACR GENIE Results; DNMT3A_p.I780T; A0201
FLESNPVMT

SEQ ID NO: 23536 - protein, 8 aa, Homo sapiens
  AACR GENIE Results; DNMT3A_p.I780T; A0201
VMTDAKEV

SEQ ID NO: 23537 - protein, 10 aa, Homo sapiens
  AACR GENIE Results; DNMT3A_p.I780T; B0801
VMTDAKEVSA

SEQ ID NO: 23538 - protein, 10 aa, Homo sapiens
  AACR GENIE Results; DNMT3A_p.P904L; A0201
ALLKEYFACV

SEQ ID NO: 23539 - protein, 9 aa, Homo sapiens
  AACR GENIE Results; DNMT3A_p.P904L; A2402
LFALLKEYF

SEQ ID NO: 23540 - protein, 9 aa, Homo sapiens
  AACR GENIE Results; DNMT3A_p.P904L; A0201
LLKEYFACV

SEQ ID NO: 23541 - protein, 8 aa, Homo sapiens
  AACR GENIE Results; DNMT3A_p.P904L; C1601
FALLKEYF

SEQ ID NO: 23542 - protein, 9 aa, Homo sapiens
  AACR GENIE Results; DNMT3A_p.P904L; A0201
ALLKEYFAC

SEQ ID NO: 23543 - protein, 9 aa, Homo sapiens
  AACR GENIE Results; DNMT3A_p.R736C; A0301
CLLHDARPK

SEQ ID NO: 23544 - protein, 9 aa, Homo sapiens
  AACR GENIE Results; DNMT3A_p.R742P; A0301
RLLHDAPPK

SEQ ID NO: 23545 - protein, 9 aa, Homo sapiens
  AACR GENIE Results; DNMT3A_p.R742P; A1101
RLLHDAPPK

SEQ ID NO: 23546 - protein, 11 aa, Homo sapiens
  AACR GENIE Results; DNMT3A_p.R742P; B3501
APPKEGDDRPF

SEQ ID NO: 23547 - protein, 9 aa, Homo sapiens
  AACR GENIE Results; DNMT3A_p.R882C; B4002
TDVSNMSCL

SEQ ID NO: 23548 - protein, 10 aa, Homo sapiens
  AACR GENIE Results; DNMT3A_p.R882C; A6801
DVSNMSCLAR

SEQ ID NO: 23549 - protein, 9 aa, Homo sapiens
  AACR GENIE Results; DNMT3A_p.R882C; A0101
YTDVSNMSC

SEQ ID NO: 23550 - protein, 9 aa, Homo sapiens
  AACR GENIE Results; DNMT3A_p.R882C; C0802
YTDVSNMSC

SEQ ID NO: 23551 - protein, 10 aa, Homo sapiens
  AACR GENIE Results; DNMT3A_p.R882C; C0802
YTDVSNMSCL

SEQ ID NO: 23552 - protein, 9 aa, Homo sapiens
  AACR GENIE Results; DNMT3A_p.R882C; B3901
TDVSNMSCL

SEQ ID NO: 23553 - protein, 9 aa, Homo sapiens
  AACR GENIE Results; DNMT3A_p.R882C; A3101
VSNMSCLAR

SEQ ID NO: 23554 - protein, 9 aa, Homo sapiens
  AACR GENIE Results; DNMT3A_p.R882C; B5801
YTDVSNMSC

SEQ ID NO: 23555 - protein, 10 aa, Homo sapiens
  AACR GENIE Results; DNMT3A_p.R882C; A3303
DVSNMSCLAR

SEQ ID NO: 23556 - protein, 9 aa, Homo sapiens
  AACR GENIE Results; DNMT3A_p.R882C; A1101
VSNMSCLAR

SEQ ID NO: 23557 - protein, 10 aa, Homo sapiens
  AACR GENIE Results; DNMT3A_p.R882H; A6801
DVSNMSHLAR

SEQ ID NO: 23558 - protein, 9 aa, Homo sapiens
  AACR GENIE Results; DNMT3A_p.R882H; A0101
YTDVSNMSH

SEQ ID NO: 23559 - protein, 10 aa, Homo sapiens
  AACR GENIE Results; DNMT3A_p.R882H; C0802
YTDVSNMSHL

SEQ ID NO: 23560 - protein, 10 aa, Homo sapiens
  AACR GENIE Results; DNMT3A_p.R882H; A3303
DVSNMSHLAR

SEQ ID NO: 23561 - protein, 9 aa, Homo sapiens
  AACR GENIE Results; DNMT3A_p.R882H; B4002
TDVSNMSHL

SEQ ID NO: 23562 - protein, 9 aa, Homo sapiens
  AACR GENIE Results; DNMT3A_p.R882H; A3101
VSNMSHLAR

SEQ ID NO: 23563 - protein, 11 aa, Homo sapiens
  AACR GENIE Results; DNMT3A_p.R882H; A0101
YTDVSNMSHLA

SEQ ID NO: 23564 - protein, 8 aa, Homo sapiens
  AACR GENIE Results; DNMT3A_p.R882H; A3303
SNMSHLAR

SEQ ID NO: 23565 - protein, 8 aa, Homo sapiens
  AACR GENIE Results; DNMT3A_p.R882H; A3303
MSHLARQR

SEQ ID NO: 23566 - protein, 8 aa, Homo sapiens
  AACR GENIE Results; DNMT3A_p.R882H; A2601
DVSNMSHL

SEQ ID NO: 23567 - protein, 9 aa, Homo sapiens
  AACR GENIE Results; DNMT3A_p.R882H; A6801
DVSNMSHLA

SEQ ID NO: 23568 - protein, 10 aa, Homo sapiens
  AACR GENIE Results; DNMT3A_p.R882H; A3303
HYTDVSNMSH

SEQ ID NO: 23569 - protein, 10 aa, Homo sapiens
  AACR GENIE Results; DNMT3A_p.R882H; C0501
YTDVSNMSHL

SEQ ID NO: 23570 - protein, 9 aa, Homo sapiens
  AACR GENIE Results; DNMT3A_p.R882H; B3801
TDVSNMSHL

SEQ ID NO: 23571 - protein, 9 aa, Homo sapiens
  AACR GENIE Results; DNMT3A_p.R882H; A3303
VSNMSHLAR

SEQ ID NO: 23572 - protein, 11 aa, Homo sapiens
  AACR GENIE Results; DNMT3A_p.R882H; A2402
HYTDVSNMSHL

SEQ ID NO: 23573 - protein, 9 aa, Homo sapiens
  AACR GENIE Results; DNMT3A_p.R882H; A3303
NMSHLARQR

SEQ ID NO: 23574 - protein, 8 aa, Homo sapiens
  AACR GENIE Results; DNMT3A_p.R882H; A3101
SNMSHLAR

SEQ ID NO: 23575 - protein, 10 aa, Homo sapiens
  AACR GENIE Results; DNMT3A_p.R882H; A3303
SNMSHLARQR

SEQ ID NO: 23576 - protein, 10 aa, Homo sapiens
  AACR GENIE Results; DNMT3A_p.R882P; A6801
DVSNMSPLAR

SEQ ID NO: 23577 - protein, 9 aa, Homo sapiens
  AACR GENIE Results; DNMT3A_p.R882P; A3101
VSNMSPLAR

SEQ ID NO: 23578 - protein, 11 aa, Homo sapiens
  AACR GENIE Results; DNMT3A_p.R882P; A3101
VSNMSPLARQR

SEQ ID NO: 23579 - protein, 11 aa, Homo sapiens
  AACR GENIE Results; DNMT3A_p.R882P; A6801
TDVSNMSPLAR

SEQ ID NO: 23580 - protein, 9 aa, Homo sapiens
  AACR GENIE Results; DNMT3A_p.R882P; B0702
SPLARQRLL

SEQ ID NO: 23581 - protein, 9 aa, Homo sapiens
  AACR GENIE Results; DNMT3A_p.R882P; A6801
NMSPLARQR

SEQ ID NO: 23582 - protein, 8 aa, Homo sapiens
  AACR GENIE Results; DNMT3A_p.R882P; B0702
SPLARQRL

SEQ ID NO: 23583 - protein, 9 aa, Homo sapiens
  AACR GENIE Results; DNMT3A_p.R882P; A1101
VSNMSPLAR

SEQ ID NO: 23584 - protein, 9 aa, Homo sapiens
  AACR GENIE Results; DNMT3A_p.R882P; A6801
VSNMSPLAR

SEQ ID NO: 23585 - protein, 8 aa, Homo sapiens
  AACR GENIE Results; DNMT3A_p.R882P; A1101
SNMSPLAR

SEQ ID NO: 23586 - protein, 8 aa, Homo sapiens
  AACR GENIE Results; DNMT3A_p.R882P; A3101
SNMSPLAR

SEQ ID NO: 23587 - protein, 10 aa, Homo sapiens
  AACR GENIE Results; DNMT3A_p.R882P; C0802
YTDVSNMSPL

SEQ ID NO: 23588 - protein, 9 aa, Homo sapiens
  AACR GENIE Results; DNMT3A_p.R882P; A0301
VSNMSPLAR

SEQ ID NO: 23589 - protein, 9 aa, Homo sapiens
  AACR GENIE Results; DNMT3A_p.R882P; C0102
MSPLARQRL

SEQ ID NO: 23590 - protein, 8 aa, Homo sapiens
  AACR GENIE Results; DNMT3A_p.R882P; A6801
SNMSPLAR

SEQ ID NO: 23591 - protein, 9 aa, Homo sapiens
  AACR GENIE Results; DNMT3A_p.R882P; A6801
DVSNMSPLA

SEQ ID NO: 23592 - protein, 9 aa, Homo sapiens
  AACR GENIE Results; DNMT3A_p.R882P; A3101
NMSPLARQR

SEQ ID NO: 23593 - protein, 10 aa, Homo sapiens
  AACR GENIE Results; DNMT3A_p.R882P; A2601
DVSNMSPLAR

SEQ ID NO: 23594 - protein, 9 aa, Homo sapiens
  AACR GENIE Results; DNMT3A_p.S129L; C0102
TLPEALRAV

SEQ ID NO: 23595 - protein, 9 aa, Homo sapiens
  AACR GENIE Results; DNMT3A_p.S129L; B3502
AAETLPEAL

SEQ ID NO: 23596 - protein, 9 aa, Homo sapiens
  AACR GENIE Results; DNMT3A_p.S129L; C0801
AAETLPEAL

SEQ ID NO: 23597 - protein, 10 aa, Homo sapiens
  AACR GENIE Results; DNMT3A_p.S129L; A6802
ETLPEALRAV

SEQ ID NO: 23598 - protein, 8 aa, Homo sapiens
  AACR GENIE Results; DNMT3A_p.S129L; B4001
AETLPEAL

SEQ ID NO: 23599 - protein, 9 aa, Homo sapiens
  AACR GENIE Results; DNMT3A_p.S129L; C0802
AAETLPEAL

SEQ ID NO: 23600 - protein, 9 aa, Homo sapiens
  AACR GENIE Results; DNMT3A_p.S129L; A0206
TLPEALRAV

SEQ ID NO: 23601 - protein, 9 aa, Homo sapiens
  AACR GENIE Results; DNMT3A_p.S129L; A0201
TLPEALRAV

SEQ ID NO: 23602 - protein, 11 aa, Homo sapiens
  AACR GENIE Results; DNMT3A_p.S129L; A6801
GAAETLPEALR

SEQ ID NO: 23603 - protein, 8 aa, Homo sapiens
  AACR GENIE Results; DNMT3A_p.S129L; B4002
AETLPEAL

SEQ ID NO: 23604 - protein, 9 aa, Homo sapiens
  AACR GENIE Results; DNMT3A_p.S129L; B1502
AAETLPEAL

SEQ ID NO: 23605 - protein, 8 aa, Homo sapiens
  AACR GENIE Results; DNMT3A_p.S129L; B5101
LPEALRAV

SEQ ID NO: 23606 - protein, 9 aa, Homo sapiens
  AACR GENIE Results; DNMT3A_p.S129L; B3503
AAETLPEAL

SEQ ID NO: 23607 - protein, 9 aa, Homo sapiens
  AACR GENIE Results; DNMT3A_p.S129L; B5001
TLPEALRAV

SEQ ID NO: 23608 - protein, 9 aa, Homo sapiens
  AACR GENIE Results; DNMT3A_p.S129L; B3901
AAETLPEAL

SEQ ID NO: 23609 - protein, 9 aa, Homo sapiens
  AACR GENIE Results; DNMT3A_p.S129L; A0205
TLPEALRAV

SEQ ID NO: 23610 - protein, 9 aa, Homo sapiens
  AACR GENIE Results; DNMT3A_p.S129L; C0501
AAETLPEAL

SEQ ID NO: 23611 - protein, 11 aa, Homo sapiens
  AACR GENIE Results; DNMT3A_p.S129L; B4002
AETLPEALRAV

SEQ ID NO: 23612 - protein, 11 aa, Homo sapiens
  AACR GENIE Results; DNMT3A_p.S129L; B2702
GAAETLPEALR

SEQ ID NO: 23613 - protein, 10 aa, Homo sapiens
  AACR GENIE Results; DNMT3A_p.S129L; A6801
AAETLPEALR

SEQ ID NO: 23614 - protein, 9 aa, Homo sapiens
  AACR GENIE Results; DNMT3A_p.S129L; A6802
ETLPEALRA

SEQ ID NO: 23615 - protein, 8 aa, Homo sapiens
  AACR GENIE Results; DNMT3A_p.S129L; B3701
AETLPEAL

SEQ ID NO: 23616 - protein, 8 aa, Homo sapiens
  AACR GENIE Results; DNMT3A_p.S129L; A3303
ETLPEALR

SEQ ID NO: 23617 - protein, 8 aa, Homo sapiens
  AACR GENIE Results; DNMT3A_p.S129L; A3001
AETLPEAL

SEQ ID NO: 23618 - protein, 10 aa, Homo sapiens
  AACR GENIE Results; DNMT3A_p.S129L; A0205
AETLPEALRA

SEQ ID NO: 23619 - protein, 10 aa, Homo sapiens
  AACR GENIE Results; DNMT3A_p.S129L; A2601
ETLPEALRAV

SEQ ID NO: 23620 - protein, 10 aa, Homo sapiens
  AACR GENIE Results; DNMT3A_p.S129L; B5001
AETLPEALRA

SEQ ID NO: 23621 - protein, 8 aa, Homo sapiens
  AACR GENIE Results; DNMT3A_p.S129L; B5501
LPEALRAV

SEQ ID NO: 23622 - protein, 9 aa, Homo sapiens
  AACR GENIE Results; DNMT3A_p.S129L; B3501
AAETLPEAL

SEQ ID NO: 23623 - protein, 11 aa, Homo sapiens
  AACR GENIE Results; DNMT3A_p.S129L; A6802
GAAETLPEALR

SEQ ID NO: 23624 - protein, 9 aa, Homo sapiens
  AACR GENIE Results; DNMT3A_p.S129L; B1302
TLPEALRAV

SEQ ID NO: 23625 - protein, 10 aa, Homo sapiens
  AACR GENIE Results; DNMT3A_p.S129L; B4002
AETLPEALRA

SEQ ID NO: 23626 - protein, 10 aa, Homo sapiens
  AACR GENIE Results; DNMT3A_p.S129L; B4002
GAAETLPEAL

SEQ ID NO: 23627 - protein, 10 aa, Homo sapiens
  AACR GENIE Results; DNMT3A_p.S129L; B4403
AETLPEALRA

SEQ ID NO: 23628 - protein, 10 aa, Homo sapiens
  AACR GENIE Results; DNMT3A_p.S129L; A0205
ETLPEALRAV

SEQ ID NO: 23629 - protein, 10 aa, Homo sapiens
  AACR GENIE Results; DNMT3A_p.W440L; B1501
MLVEPEAAAY

SEQ ID NO: 23630 - protein, 10 aa, Homo sapiens
  AACR GENIE Results; DNMT3A_p.W440L; B3501
MLVEPEAAAY

SEQ ID NO: 23631 - protein, 9 aa, Homo sapiens
  AACR GENIE Results; DNMT3A_p.W440L; A0101
LVEPEAAAY

SEQ ID NO: 23632 - protein, 9 aa, Homo sapiens
  AACR GENIE Results; DNMT3A_p.W440L; B3501
LVEPEAAAY

SEQ ID NO: 23633 - protein, 9 aa, Homo sapiens
  AACR GENIE Results; DNMT3A_p.W440L; B1501
LVEPEAAAY

SEQ ID NO: 23634 - protein, 10 aa, Homo sapiens
  AACR GENIE Results; DNMT3A_p.W440L; A2601
MLVEPEAAAY

SEQ ID NO: 23635 - protein, 9 aa, Homo sapiens
  AACR GENIE Results; DNMT3A_p.W440L; A0201
MLVEPEAAA

SEQ ID NO: 23636 - protein, 10 aa, Homo sapiens
  AACR GENIE Results; DNMT3A_p.W440L; A0101
MLVEPEAAAY

SEQ ID NO: 23637 - protein, 9 aa, Homo sapiens
  AACR GENIE Results; DNMT3A_p.W440L; A2601
LVEPEAAAY

SEQ ID NO: 23638 - protein, 8 aa, Homo sapiens
  AACR GENIE Results; DNMT3A_p.W440L; B4001
KEVYTDML

SEQ ID NO: 23639 - protein, 9 aa, Homo sapiens
  AACR GENIE Results; EGFR_p.A289T; A0301
YSFGTTCVK

SEQ ID NO: 23640 - protein, 10 aa, Homo sapiens
  AACR GENIE Results; EGFR_p.A289T; A0301
YSFGTTCVKK

SEQ ID NO: 23641 - protein, 8 aa, Homo sapiens
  AACR GENIE Results; EGFR_p.A289V; B5101
YSFGVTCV

SEQ ID NO: 23642 - protein, 10 aa, Homo sapiens
  AACR GENIE Results; EGFR_p.A289V; A1101
YSFGVTCVKK

SEQ ID NO: 23643 - protein, 10 aa, Homo sapiens
  AACR GENIE Results; EGFR_p.A289V; A6801
YSFGVTCVKK

SEQ ID NO: 23644 - protein, 8 aa, Homo sapiens
  AACR GENIE Results; EGFR_p.A289V; B1302
YSFGVTCV

SEQ ID NO: 23645 - protein, 8 aa, Homo sapiens
  AACR GENIE Results; EGFR_p.A289V; C1203
YSFGVTCV

SEQ ID NO: 23646 - protein, 9 aa, Homo sapiens
  AACR GENIE Results; EGFR_p.A750P; A0301
ELREPTSPK

SEQ ID NO: 23647 - protein, 10 aa, Homo sapiens
  AACR GENIE Results; EGFR_p.A750P; A0301
KELREPTSPK

SEQ ID NO: 23648 - protein, 9 aa, Homo sapiens
  AACR GENIE Results; EGFR_p.A755G; B0702
SPKGNKEIL

SEQ ID NO: 23649 - protein, 9 aa, Homo sapiens
  AACR GENIE Results; EGFR_p.A755G; C0102
TSPKGNKEI

SEQ ID NO: 23650 - protein, 9 aa, Homo sapiens
  AACR GENIE Results; EGFR_p.A767_V769dup; A0201
YVMASVASV

SEQ ID NO: 23651 - protein, 10 aa, Homo sapiens
  AACR GENIE Results; EGFR_p.A767_V769dup; A6802
SVASVDNPHV

SEQ ID NO: 23652 - protein, 9 aa, Homo sapiens
  AACR GENIE Results; EGFR_p.A767_V769dup; A6802
YVMASVASV

SEQ ID NO: 23653 - protein, 10 aa, Homo sapiens
  AACR GENIE Results; EGFR_p.A767_V769dup; A0201
SVASVDNPHV

SEQ ID NO: 23654 - protein, 9 aa, Homo sapiens
  AACR GENIE Results; EGFR_p.A767_V769dup; B1302
YVMASVASV

SEQ ID NO: 23655 - protein, 9 aa, Homo sapiens
  AACR GENIE Results; EGFR_p.A767_V769dup; A2601
YVMASVASV

SEQ ID NO: 23656 - protein, 9 aa, Homo sapiens
  AACR GENIE Results; EGFR_p.A767_V769dup; B0801
YVMASVASV

SEQ ID NO: 23657 - protein, 10 aa, Homo sapiens
  AACR GENIE Results; EGFR_p.A767_V769dup; B1801
DEAYVMASVA

SEQ ID NO: 23658 - protein, 11 aa, Homo sapiens
  AACR GENIE Results; EGFR_p.A767_V769dup; A6802
SVASVDNPHVC

SEQ ID NO: 23659 - protein, 9 aa, Homo sapiens
  AACR GENIE Results; EGFR_p.A767_V769dup; A0201
VASVDNPHV

SEQ ID NO: 23660 - protein, 9 aa, Homo sapiens
  AACR GENIE Results; EGFR_p.A767_V769dup; A1101
SVASVDNPH

SEQ ID NO: 23661 - protein, 9 aa, Homo sapiens
  AACR GENIE Results; EGFR_p.A767_V769dup; B4002
YVMASVASV

SEQ ID NO: 23662 - protein, 9 aa, Homo sapiens
  AACR GENIE Results; EGFR_p.A767_V769dup; A3001
YVMASVASV

SEQ ID NO: 23663 - protein, 8 aa, Homo sapiens
  AACR GENIE Results; EGFR_p.A767_V769dup; A0201
VMASVASV

SEQ ID NO: 23664 - protein, 9 aa, Homo sapiens
  AACR GENIE Results; EGFR_p.A767_V769dup; B3503
YVMASVASV

SEQ ID NO: 23665 - protein, 9 aa, Homo sapiens
  AACR GENIE Results; EGFR_p.A767_V769dup; B5101
YVMASVASV

SEQ ID NO: 23666 - protein, 9 aa, Homo sapiens
  AACR GENIE Results; EGFR_p.C797S; B3501
MPFGSLLDY

SEQ ID NO: 23667 - protein, 10 aa, Homo sapiens
  AACR GENIE Results; EGFR_p.C797S; A6802
MPFGSLLDYV

SEQ ID NO: 23668 - protein, 10 aa, Homo sapiens
  AACR GENIE Results; EGFR_p.C797S; B5101
MPFGSLLDYV

SEQ ID NO: 23669 - protein, 9 aa, Homo sapiens
  AACR GENIE Results; EGFR_p.C797S; B3503
MPFGSLLDY

SEQ ID NO: 23670 - protein, 9 aa, Homo sapiens
  AACR GENIE Results; EGFR_p.C797S; B2702
MPFGSLLDY

SEQ ID NO: 23671 - protein, 10 aa, Homo sapiens
  AACR GENIE Results; EGFR_p.C797S; A2902
LMPFGSLLDY

SEQ ID NO: 23672 - protein, 9 aa, Homo sapiens
  AACR GENIE Results; EGFR_p.C797S; A0301
SLLDYVREH

SEQ ID NO: 23673 - protein, 11 aa, Homo sapiens
  AACR GENIE Results; EGFR_p.C797S; A2902
QLMPFGSLLDY

SEQ ID NO: 23674 - protein, 9 aa, Homo sapiens
  AACR GENIE Results; EGFR_p.E709_T710delinsD; A2301
DEFKKIKVL

SEQ ID NO: 23675 - protein, 9 aa, Homo sapiens
  AACR GENIE Results; EGFR_p.E709_T710delinsD; B1801
DEFKKIKVL

SEQ ID NO: 23676 - protein, 8 aa, Homo sapiens
  AACR GENIE Results; EGFR_p.E709_T710delinsD; B1801
DEFKKIKV

SEQ ID NO: 23677 - protein, 9 aa, Homo sapiens
  AACR GENIE Results; EGFR_p.E709_T710delinsD; B4403
DEFKKIKVL

SEQ ID NO: 23678 - protein, 9 aa, Homo sapiens
  AACR GENIE Results; EGFR_p.E709A; A0301
RILKATEFK

SEQ ID NO: 23679 - protein, 9 aa, Homo sapiens
  AACR GENIE Results; EGFR_p.E709V; B5101
QALLRILKV

SEQ ID NO: 23680 - protein, 9 aa, Homo sapiens
  AACR GENIE Results; EGFR_p.E709V; C0602
LRILKVTEF

SEQ ID NO: 23681 - protein, 9 aa, Homo sapiens
  AACR GENIE Results; EGFR_p.E746_A750del; B5502
IPVAIKTSP

SEQ ID NO: 23682 - protein, 9 aa, Homo sapiens
  AACR GENIE Results; EGFR_p.E746_A750del; B5401
IPVAIKTSP

SEQ ID NO: 23683 - protein, 9 aa, Homo sapiens
  AACR GENIE Results; EGFR_p.E746_A750del; B5501
IPVAIKTSP

SEQ ID NO: 23684 - protein, 11 aa, Homo sapiens
  AACR GENIE Results; EGFR_p.E746_A750del; B5401
IPVAIKTSPKA

SEQ ID NO: 23685 - protein, 11 aa, Homo sapiens
  AACR GENIE Results; EGFR_p.E746_A750del; B5502
IPVAIKTSPKA

SEQ ID NO: 23686 - protein, 9 aa, Homo sapiens
  AACR GENIE Results; EGFR_p.E746_A750del; A0301
PVAIKTSPK

SEQ ID NO: 23687 - protein, 9 aa, Homo sapiens
  AACR GENIE Results; EGFR_p.E746_A750del; B3501
IPVAIKTSP

SEQ ID NO: 23688 - protein, 8 aa, Homo sapiens
  AACR GENIE Results; EGFR_p.E746_A750del; A1101
VAIKTSPK

SEQ ID NO: 23689 - protein, 11 aa, Homo sapiens
  AACR GENIE Results; EGFR_p.E746_A750del; A0301
KIPVAIKTSPK

SEQ ID NO: 23690 - protein, 9 aa, Homo sapiens
  AACR GENIE Results; EGFR_p.E746_A750del; A1101
PVAIKTSPK

SEQ ID NO: 23691 - protein, 9 aa, Homo sapiens
  AACR GENIE Results; EGFR_p.E746_A750del; A0302
PVAIKTSPK

SEQ ID NO: 23692 - protein, 9 aa, Homo sapiens
  AACR GENIE Results; EGFR_p.E746_T751delinsA; A0301
PVAIKASPK

SEQ ID NO: 23693 - protein, 9 aa, Homo sapiens
  AACR GENIE Results; EGFR_p.E746_T751delinsA; C0102
ASPKANKEI

SEQ ID NO: 23694 - protein, 9 aa, Homo sapiens
  AACR GENIE Results; EGFR_p.G719A; B1501
ASGAFGTVY

SEQ ID NO: 23695 - protein, 10 aa, Homo sapiens
  AACR GENIE Results; EGFR_p.G719A; A1101
ASGAFGTVYK

SEQ ID NO: 23696 - protein, 9 aa, Homo sapiens
  AACR GENIE Results; EGFR_p.G719A; B1503
IKVLASGAF

SEQ ID NO: 23697 - protein, 9 aa, Homo sapiens
  AACR GENIE Results; EGFR_p.G719A; A3002
ASGAFGTVY

SEQ ID NO: 23698 - protein, 11 aa, Homo sapiens
  AACR GENIE Results; EGFR_p.G719A; B1501
VLASGAFGTVY

SEQ ID NO: 23699 - protein, 9 aa, Homo sapiens
  AACR GENIE Results; EGFR_p.G719A; B1503
ASGAFGTVY

SEQ ID NO: 23700 - protein, 9 aa, Homo sapiens
  AACR GENIE Results; EGFR_p.G719A; B5801
ASGAFGTVY

SEQ ID NO: 23701 - protein, 10 aa, Homo sapiens
  AACR GENIE Results; EGFR_p.G719A; A0301
ASGAFGTVYK

SEQ ID NO: 23702 - protein, 10 aa, Homo sapiens
  AACR GENIE Results; EGFR_p.G719A; B1501
LASGAFGTVY

SEQ ID NO: 23703 - protein, 9 aa, Homo sapiens
  AACR GENIE Results; EGFR_p.G719A; B3901
ASGAFGTVY

SEQ ID NO: 23704 - protein, 10 aa, Homo sapiens
  AACR GENIE Results; EGFR_p.G719A; C0202
LASGAFGTVY

SEQ ID NO: 23705 - protein, 10 aa, Homo sapiens
  AACR GENIE Results; EGFR_p.G719A; B3501
LASGAFGTVY

SEQ ID NO: 23706 - protein, 10 aa, Homo sapiens
  AACR GENIE Results; EGFR_p.G719A; A0201
VLASGAFGTV

SEQ ID NO: 23707 - protein, 9 aa, Homo sapiens
  AACR GENIE Results; EGFR_p.G719A; B5101
LASGAFGTV

SEQ ID NO: 23708 - protein, 10 aa, Homo sapiens
  AACR GENIE Results; EGFR_p.G719A; A3002
LASGAFGTVY

SEQ ID NO: 23709 - protein, 9 aa, Homo sapiens
  AACR GENIE Results; EGFR_p.G719C; B1501
CSGAFGTVY

SEQ ID NO: 23710 - protein, 9 aa, Homo sapiens
  AACR GENIE Results; EGFR_p.G719C; B5801
CSGAFGTVY

SEQ ID NO: 23711 - protein, 10 aa, Homo sapiens
  AACR GENIE Results; EGFR_p.G719C; A1101
CSGAFGTVYK

SEQ ID NO: 23712 - protein, 9 aa, Homo sapiens
  AACR GENIE Results; EGFR_p.G719S; B1501
SSGAFGTVY

SEQ ID NO: 23713 - protein, 10 aa, Homo sapiens
  AACR GENIE Results; EGFR_p.G719S; A1101
SSGAFGTVYK

SEQ ID NO: 23714 - protein, 11 aa, Homo sapiens
  AACR GENIE Results; EGFR_p.G719S; B1501
VLSSGAFGTVY

SEQ ID NO: 23715 - protein, 11 aa, Homo sapiens
  AACR GENIE Results; EGFR_p.G719S; A1101
LSSGAFGTVYK

SEQ ID NO: 23716 - protein, 9 aa, Homo sapiens
  AACR GENIE Results; EGFR_p.G719S; B3901
SSGAFGTVY

SEQ ID NO: 23717 - protein, 10 aa, Homo sapiens
  AACR GENIE Results; EGFR_p.G719S; B1501
LSSGAFGTVY

SEQ ID NO: 23718 - protein, 9 aa, Homo sapiens
  AACR GENIE Results; EGFR_p.G719S; B3501
SSGAFGTVY

SEQ ID NO: 23719 - protein, 10 aa, Homo sapiens
  AACR GENIE Results; EGFR_p.G719S; A6801
SSGAFGTVYK

SEQ ID NO: 23720 - protein, 10 aa, Homo sapiens
  AACR GENIE Results; EGFR_p.G719S; B2702
SSGAFGTVYK

SEQ ID NO: 23721 - protein, 9 aa, Homo sapiens
  AACR GENIE Results; EGFR_p.G724S; A1101
SGAFSTVYK

SEQ ID NO: 23722 - protein, 9 aa, Homo sapiens
  AACR GENIE Results; EGFR_p.G724S; B1501
GSGAFSTVY

SEQ ID NO: 23723 - protein, 10 aa, Homo sapiens
  AACR GENIE Results; EGFR_p.G724S; A1101
GSGAFSTVYK

SEQ ID NO: 23724 - protein, 9 aa, Homo sapiens
  AACR GENIE Results; EGFR_p.G724S; A0301
SGAFSTVYK

SEQ ID NO: 23725 - protein, 8 aa, Homo sapiens
  AACR GENIE Results; EGFR_p.G724S; B1501
SGAFSTVY

SEQ ID NO: 23726 - protein, 11 aa, Homo sapiens
  AACR GENIE Results; EGFR_p.G724S; B1501
VLGSGAFSTVY

SEQ ID NO: 23727 - protein, 9 aa, Homo sapiens
  AACR GENIE Results; EGFR_p.G724S; A6801
SGAFSTVYK

SEQ ID NO: 23728 - protein, 10 aa, Homo sapiens
  AACR GENIE Results; EGFR_p.G724S; A0301
GSGAFSTVYK

SEQ ID NO: 23729 - protein, 11 aa, Homo sapiens
  AACR GENIE Results; EGFR_p.G724S; A0201
KVLGSGAFSTV

SEQ ID NO: 23730 - protein, 8 aa, Homo sapiens
  AACR GENIE Results; EGFR_p.G724S; A1101
GAFSTVYK

SEQ ID NO: 23731 - protein, 8 aa, Homo sapiens
  AACR GENIE Results; EGFR_p.G724S; B3501
SGAFSTVY

SEQ ID NO: 23732 - protein, 9 aa, Homo sapiens
  AACR GENIE Results; EGFR_p.H773_V774insAH; C0501
SVDNPHAHV

SEQ ID NO: 23733 - protein, 9 aa, Homo sapiens
  AACR GENIE Results; EGFR_p.H773_V774insAH; A1101
ASVDNPHAH

SEQ ID NO: 23734 - protein, 11 aa, Homo sapiens
  AACR GENIE Results; EGFR_p.H773_V774insAH; A1101
SVDNPHAHVCR

SEQ ID NO: 23735 - protein, 8 aa, Homo sapiens
  AACR GENIE Results; EGFR_p.H773dup; C0501
SVDNPHHV

SEQ ID NO: 23736 - protein, 10 aa, Homo sapiens
  AACR GENIE Results; EGFR_p.H773dup; A1101
SVDNPHHVCR

SEQ ID NO: 23737 - protein, 10 aa, Homo sapiens
  AACR GENIE Results; EGFR_p.H773dup; A6801
SVDNPHHVCR

SEQ ID NO: 23738 - protein, 11 aa, Homo sapiens
  AACR GENIE Results; EGFR_p.H773dup; A0201
VMASVDNPHHV

SEQ ID NO: 23739 - protein, 8 aa, Homo sapiens
  AACR GENIE Results; EGFR_p.H773dup; C0802
SVDNPHHV

SEQ ID NO: 23740 - protein, 8 aa, Homo sapiens
  AACR GENIE Results; EGFR_p.H773dup; C0401
SVDNPHHV

SEQ ID NO: 23741 - protein, 9 aa, Homo sapiens
  AACR GENIE Results; EGFR_p.H773dup; C0802
SVDNPHHVC

SEQ ID NO: 23742 - protein, 9 aa, Homo sapiens
  AACR GENIE Results; EGFR_p.I740_K745dup; A0301
AIKIPVAIK

SEQ ID NO: 23743 - protein, 11 aa, Homo sapiens
  AACR GENIE Results; EGFR_p.L62R; A2601
EVVRGNLEITY

SEQ ID NO: 23744 - protein, 10 aa, Homo sapiens
  AACR GENIE Results; EGFR_p.L62R; B1501
VVRGNLEITY

SEQ ID NO: 23745 - protein, 11 aa, Homo sapiens
  AACR GENIE Results; EGFR_p.L62R; B3501
EVVRGNLEITY

SEQ ID NO: 23746 - protein, 9 aa, Homo sapiens
  AACR GENIE Results; EGFR_p.L747_E749del; A0301
AIKEATSPK

SEQ ID NO: 23747 - protein, 8 aa, Homo sapiens
  AACR GENIE Results; EGFR_p.L747_E749del; B5501
IPVAIKEA

SEQ ID NO: 23748 - protein, 9 aa, Homo sapiens
  AACR GENIE Results; EGFR_p.L747_E749del; A3001
AIKEATSPK

SEQ ID NO: 23749 - protein, 9 aa, Homo sapiens
  AACR GENIE Results; EGFR_p.L747_E749del; A1101
AIKEATSPK

SEQ ID NO: 23750 - protein, 10 aa, Homo sapiens
  AACR GENIE Results; EGFR_p.L747_E749del; B2702
VAIKEATSPK

SEQ ID NO: 23751 - protein, 10 aa, Homo sapiens
  AACR GENIE Results; EGFR_p.L747_E749del; A1101
VAIKEATSPK

SEQ ID NO: 23752 - protein, 10 aa, Homo sapiens
  AACR GENIE Results; EGFR_p.L747_E749del; A0301
VAIKEATSPK

SEQ ID NO: 23753 - protein, 9 aa, Homo sapiens
  AACR GENIE Results; EGFR_p.L858R; C0501
ITDFGRAKL

SEQ ID NO: 23754 - protein, 9 aa, Homo sapiens
  AACR GENIE Results; EGFR_p.L858R; B3701
TDFGRAKLL

SEQ ID NO: 23755 - protein, 9 aa, Homo sapiens
  AACR GENIE Results; EGFR_p.L858R; C0802
ITDFGRAKL

SEQ ID NO: 23756 - protein, 8 aa, Homo sapiens
  AACR GENIE Results; EGFR_p.L858R; B4102
TDFGRAKL

SEQ ID NO: 23757 - protein, 8 aa, Homo sapiens
  AACR GENIE Results; EGFR_p.L858R; B4002
TDFGRAKL

SEQ ID NO: 23758 - protein, 9 aa, Homo sapiens
  AACR GENIE Results; EGFR_p.L858R; A0301
KITDFGRAK

SEQ ID NO: 23759 - protein, 9 aa, Homo sapiens
  AACR GENIE Results; EGFR_p.L858R; A1101
KITDFGRAK

SEQ ID NO: 23760 - protein, 11 aa, Homo sapiens
  AACR GENIE Results; EGFR_p.L858R; B2705
GRAKLLGAEEK

SEQ ID NO: 23761 - protein, 10 aa, Homo sapiens
  AACR GENIE Results; EGFR_p.L861Q; B1501
KQLGAEEKEY

SEQ ID NO: 23762 - protein, 10 aa, Homo sapiens
  AACR GENIE Results; EGFR_p.L861Q; A3002
KQLGAEEKEY

SEQ ID NO: 23763 - protein, 9 aa, Homo sapiens
  AACR GENIE Results; EGFR_p.L861Q; B4403
TDFGLAKQL

SEQ ID NO: 23764 - protein, 9 aa, Homo sapiens
  AACR GENIE Results; EGFR_p.L861Q; B4002
TDFGLAKQL

SEQ ID NO: 23765 - protein, 10 aa, Homo sapiens
  AACR GENIE Results; EGFR_p.L861Q; B1503
KQLGAEEKEY

SEQ ID NO: 23766 - protein, 9 aa, Homo sapiens
  AACR GENIE Results; EGFR_p.L861Q; B4402
TDFGLAKQL

SEQ ID NO: 23767 - protein, 9 aa, Homo sapiens
  AACR GENIE Results; EGFR_p.L861R; B4403
TDFGLAKRL

SEQ ID NO: 23768 - protein, 10 aa, Homo sapiens
  AACR GENIE Results; EGFR_p.N771_H773dup; A0201
SVDNPHNPHV

SEQ ID NO: 23769 - protein, 10 aa, Homo sapiens
  AACR GENIE Results; EGFR_p.N771_P772insH; A1101
SVDNHPHVCR

SEQ ID NO: 23770 - protein, 10 aa, Homo sapiens
  AACR GENIE Results; EGFR_p.N771_P772insH; A3101
SVDNHPHVCR

SEQ ID NO: 23771 - protein, 8 aa, Homo sapiens
  AACR GENIE Results; EGFR_p.N771_P772insH; C0501
SVDNHPHV

SEQ ID NO: 23772 - protein, 8 aa, Homo sapiens
  AACR GENIE Results; EGFR_p.N771_P772insH; C0802
SVDNHPHV

SEQ ID NO: 23773 - protein, 10 aa, Homo sapiens
  AACR GENIE Results; EGFR_p.N771_P772insH; A6801
SVDNHPHVCR

SEQ ID NO: 23774 - protein, 9 aa, Homo sapiens
  AACR GENIE Results; EGFR_p.N771_P772insH; C1502
ASVDNHPHV

SEQ ID NO: 23775 - protein, 9 aa, Homo sapiens
  AACR GENIE Results; EGFR_p.N771_P772insH; A3101
VDNHPHVCR

SEQ ID NO: 23776 - protein, 9 aa, Homo sapiens
  AACR GENIE Results; EGFR_p.N771_P772insH; B1302
ASVDNHPHV

SEQ ID NO: 23777 - protein, 10 aa, Homo sapiens
  AACR GENIE Results; EGFR_p.N771dup; A1101
SVDNNPHVCR

SEQ ID NO: 23778 - protein, 8 aa, Homo sapiens
  AACR GENIE Results; EGFR_p.N771dup; C0501
SVDNNPHV

SEQ ID NO: 23779 - protein, 9 aa, Homo sapiens
  AACR GENIE Results; EGFR_p.N771dup; A0201
SVDNNPHVC

SEQ ID NO: 23780 - protein, 9 aa, Homo sapiens
  AACR GENIE Results; EGFR_p.R108K; B1501
LQIIKGNMY

SEQ ID NO: 23781 - protein, 9 aa, Homo sapiens
  AACR GENIE Results; EGFR_p.R108K; B1501
QIIKGNMYY

SEQ ID NO: 23782 - protein, 8 aa, Homo sapiens
  AACR GENIE Results; EGFR_p.R108K; B1501
QIIKGNMY

SEQ ID NO: 23783 - protein, 9 aa, Homo sapiens
  AACR GENIE Results; EGFR_p.R108K; A2902
QIIKGNMYY

SEQ ID NO: 23784 - protein, 10 aa, Homo sapiens
  AACR GENIE Results; EGFR_p.R748K; A0301
KELKEATSPK

SEQ ID NO: 23785 - protein, 9 aa, Homo sapiens
  AACR GENIE Results; EGFR_p.R748K; A0301
ELKEATSPK

SEQ ID NO: 23786 - protein, 10 aa, Homo sapiens
  AACR GENIE Results; EGFR_p.R776H; C0501
SVDNPHVCHL

SEQ ID NO: 23787 - protein, 10 aa, Homo sapiens
  AACR GENIE Results; EGFR_p.R776H; A1101
SVDNPHVCHL

SEQ ID NO: 23788 - protein, 9 aa, Homo sapiens
  AACR GENIE Results; EGFR_p.S177L; A0201
MLMDFQNHL

SEQ ID NO: 23789 - protein, 9 aa, Homo sapiens
  AACR GENIE Results; EGFR_p.S177L; C0802
SSDFLSNML

SEQ ID NO: 23790 - protein, 8 aa, Homo sapiens
  AACR GENIE Results; EGFR_p.S177L; C0802
LMDFQNHL

SEQ ID NO: 23791 - protein, 9 aa, Homo sapiens
  AACR GENIE Results; EGFR_p.S752_I759del; A0201
TLDEAYVMA

SEQ ID NO: 23792 - protein, 11 aa, Homo sapiens
  AACR GENIE Results; EGFR_p.S752_I759del; B4001
REATLDEAYVM

SEQ ID NO: 23793 - protein, 8 aa, Homo sapiens
  AACR GENIE Results; EGFR_p.S752_I759del; B3501
TLDEAYVM

SEQ ID NO: 23794 - protein, 9 aa, Homo sapiens
  AACR GENIE Results; EGFR_p.S752_I759del; B1801
REATLDEAY

SEQ ID NO: 23795 - protein, 9 aa, Homo sapiens
  AACR GENIE Results; EGFR_p.S752_I759del; B4403
REATLDEAY

SEQ ID NO: 23796 - protein, 8 aa, Homo sapiens
  AACR GENIE Results; EGFR_p.S752_I759del; C0802
TLDEAYVM

SEQ ID NO: 23797 - protein, 9 aa, Homo sapiens
  AACR GENIE Results; EGFR_p.S752_I759del; A0201
ATLDEAYVM

SEQ ID NO: 23798 - protein, 8 aa, Homo sapiens
  AACR GENIE Results; EGFR_p.S752_I759del; C0501
TLDEAYVM

SEQ ID NO: 23799 - protein, 9 aa, Homo sapiens
  AACR GENIE Results; EGFR_p.S752_I759del; A1101
ATLDEAYVM

SEQ ID NO: 23800 - protein, 11 aa, Homo sapiens
  AACR GENIE Results; EGFR_p.S752_I759del; A2601
ELREATLDEAY

SEQ ID NO: 23801 - protein, 8 aa, Homo sapiens
  AACR GENIE Results; EGFR_p.S752_I759del; B3501
EATLDEAY

SEQ ID NO: 23802 - protein, 9 aa, Homo sapiens
  AACR GENIE Results; EGFR_p.S752_I759del; B4402
REATLDEAY

SEQ ID NO: 23803 - protein, 9 aa, Homo sapiens
  AACR GENIE Results; EGFR_p.S752_I759del; B1501
REATLDEAY

SEQ ID NO: 23804 - protein, 9 aa, Homo sapiens
  AACR GENIE Results; EGFR_p.S752_I759del; B5701
ATLDEAYVM

SEQ ID NO: 23805 - protein, 10 aa, Homo sapiens
  AACR GENIE Results; EGFR_p.S768_D770dup; A6801
DSVDNPHVCR

SEQ ID NO: 23806 - protein, 9 aa, Homo sapiens
  AACR GENIE Results; EGFR_p.S768_D770dup; A0201
YVMASVDSV

SEQ ID NO: 23807 - protein, 10 aa, Homo sapiens
  AACR GENIE Results; EGFR_p.S768_D770dup; A0201
SVDSVDNPHV

SEQ ID NO: 23808 - protein, 9 aa, Homo sapiens
  AACR GENIE Results; EGFR_p.S768_D770dup; B1302
YVMASVDSV

SEQ ID NO: 23809 - protein, 9 aa, Homo sapiens
  AACR GENIE Results; EGFR_p.S768_D770dup; A2601
YVMASVDSV

SEQ ID NO: 23810 - protein, 8 aa, Homo sapiens
  AACR GENIE Results; EGFR_p.S768_D770dup; B5101
DSVDNPHV

SEQ ID NO: 23811 - protein, 8 aa, Homo sapiens
  AACR GENIE Results; EGFR_p.S768I; B1801
DEAYVMAI

SEQ ID NO: 23812 - protein, 8 aa, Homo sapiens
  AACR GENIE Results; EGFR_p.S768I; B5101
EAYVMAIV

SEQ ID NO: 23813 - protein, 9 aa, Homo sapiens
  AACR GENIE Results; EGFR_p.S768I; A3303
IVDNPHVCR

SEQ ID NO: 23814 - protein, 8 aa, Homo sapiens
  AACR GENIE Results; EGFR_p.S768I; B4901
DEAYVMAI

SEQ ID NO: 23815 - protein, 10 aa, Homo sapiens
  AACR GENIE Results; EGFR_p.S768I; C0501
IVDNPHVCRL

SEQ ID NO: 23816 - protein, 9 aa, Homo sapiens
  AACR GENIE Results; EGFR_p.S768I; A3101
IVDNPHVCR

SEQ ID NO: 23817 - protein, 9 aa, Homo sapiens
  AACR GENIE Results; EGFR_p.S768I; B3503
MAIVDNPHV

SEQ ID NO: 23818 - protein, 9 aa, Homo sapiens
  AACR GENIE Results; EGFR_p.S768I; B3502
MAIVDNPHV

SEQ ID NO: 23819 - protein, 10 aa, Homo sapiens
  AACR GENIE Results; EGFR_p.S768I; A0201
VMAIVDNPHV

SEQ ID NO: 23820 - protein, 9 aa, Homo sapiens
  AACR GENIE Results; EGFR_p.S768I; A1101
IVDNPHVCR

SEQ ID NO: 23821 - protein, 9 aa, Homo sapiens
  AACR GENIE Results; EGFR_p.S768I; A6802
MAIVDNPHV

SEQ ID NO: 23822 - protein, 9 aa, Homo sapiens
  AACR GENIE Results; EGFR_p.S768I; A6801
IVDNPHVCR

SEQ ID NO: 23823 - protein, 9 aa, Homo sapiens
  AACR GENIE Results; EGFR_p.S768I; A0201
AIVDNPHVC

SEQ ID NO: 23824 - protein, 9 aa, Homo sapiens
  AACR GENIE Results; EGFR_p.S768I; A0205
AIVDNPHVC

SEQ ID NO: 23825 - protein, 9 aa, Homo sapiens
  AACR GENIE Results; EGFR_p.S768I; B5101
MAIVDNPHV

SEQ ID NO: 23826 - protein, 10 aa, Homo sapiens
  AACR GENIE Results; EGFR_p.S768I; A6801
AIVDNPHVCR

SEQ ID NO: 23827 - protein, 9 aa, Homo sapiens
  AACR GENIE Results; EGFR_p.S768I; A3301
IVDNPHVCR

SEQ ID NO: 23828 - protein, 10 aa, Homo sapiens
  AACR GENIE Results; EGFR_p.S768I; C0802
IVDNPHVCRL

SEQ ID NO: 23829 - protein, 9 aa, Homo sapiens
  AACR GENIE Results; EGFR_p.S768I; B5001
AIVDNPHVC

SEQ ID NO: 23830 - protein, 9 aa, Homo sapiens
  AACR GENIE Results; EGFR_p.S768I; A0201
MAIVDNPHV

SEQ ID NO: 23831 - protein, 11 aa, Homo sapiens
  AACR GENIE Results; EGFR_p.S768I; A0201
YVMAIVDNPHV

SEQ ID NO: 23832 - protein, 9 aa, Homo sapiens
  AACR GENIE Results; EGFR_p.S768I; A0301
IVDNPHVCR

SEQ ID NO: 23833 - protein, 10 aa, Homo sapiens
  AACR GENIE Results; EGFR_p.S768I; C0802
ILDEAYVMAI

SEQ ID NO: 23834 - protein, 9 aa, Homo sapiens
  AACR GENIE Results; EGFR_p.T751I; A0301
ELREAISPK

SEQ ID NO: 23835 - protein, 9 aa, Homo sapiens
  AACR GENIE Results; EGFR_p.T751I; C0102
ISPKANKEI

SEQ ID NO: 23836 - protein, 9 aa, Homo sapiens
  AACR GENIE Results; EGFR_p.T790M; A0205
STVQLIMQL

SEQ ID NO: 23837 - protein, 9 aa, Homo sapiens
  AACR GENIE Results; EGFR_p.T790M; A6802
STVQLIMQL

SEQ ID NO: 23838 - protein, 9 aa, Homo sapiens
  AACR GENIE Results; EGFR_p.T790M; A0206
STVQLIMQL

SEQ ID NO: 23839 - protein, 9 aa, Homo sapiens
  AACR GENIE Results; EGFR_p.T790M; A1101
STVQLIMQL

SEQ ID NO: 23840 - protein, 9 aa, Homo sapiens
  AACR GENIE Results; EGFR_p.T790M; A2601
STVQLIMQL

SEQ ID NO: 23841 - protein, 9 aa, Homo sapiens
  AACR GENIE Results; EGFR_p.T790M; C1502
LTSTVQLIM

SEQ ID NO: 23842 - protein, 9 aa, Homo sapiens
  AACR GENIE Results; EGFR_p.T790M; B5801
STVQLIMQL

SEQ ID NO: 23843 - protein, 9 aa, Homo sapiens
  AACR GENIE Results; EGFR_p.T790M; A6801
STVQLIMQL

SEQ ID NO: 23844 - protein, 9 aa, Homo sapiens
  AACR GENIE Results; EGFR_p.T790M; C1502
STVQLIMQL

SEQ ID NO: 23845 - protein, 8 aa, Homo sapiens
  AACR GENIE Results; EGFR_p.V765L; B5101
EAYLMASV

SEQ ID NO: 23846 - protein, 9 aa, Homo sapiens
  AACR GENIE Results; EGFR_p.V765L; B1801
DEAYLMASV

SEQ ID NO: 23847 - protein, 9 aa, Homo sapiens
  AACR GENIE Results; EGFR_p.V765L; B4001
KEILDEAYL

SEQ ID NO: 23848 - protein, 9 aa, Homo sapiens
  AACR GENIE Results; EGFR_p.V765L; A0201
ILDEAYLMA

SEQ ID NO: 23849 - protein, 11 aa, Homo sapiens
  AACR GENIE Results; EGFR_p.V765L; A0201
YLMASVDNPHV

SEQ ID NO: 23850 - protein, 8 aa, Homo sapiens
  AACR GENIE Results; EGFR_p.V765L; C0501
ILDEAYLM

SEQ ID NO: 23851 - protein, 10 aa, Homo sapiens
  AACR GENIE Results; EGFR_p.V765L; A0201
LMASVDNPHV

SEQ ID NO: 23852 - protein, 8 aa, Homo sapiens
  AACR GENIE Results; EGFR_p.V765L; C0802
ILDEAYLM

SEQ ID NO: 23853 - protein, 9 aa, Homo sapiens
  AACR GENIE Results; EGFR_p.V769L; B1801
DEAYVMASL

SEQ ID NO: 23854 - protein, 8 aa, Homo sapiens
  AACR GENIE Results; EGFR_p.V769L; B5101
EAYVMASL

SEQ ID NO: 23855 - protein, 10 aa, Homo sapiens
  AACR GENIE Results; EGFR_p.V769L; A0201
VMASLDNPHV

SEQ ID NO: 23856 - protein, 9 aa, Homo sapiens
  AACR GENIE Results; EGFR_p.V769L; A1101
SLDNPHVCR

SEQ ID NO: 23857 - protein, 11 aa, Homo sapiens
  AACR GENIE Results; EGFR_p.V769L; A1101
ASLDNPHVCRL

SEQ ID NO: 23858 - protein, 10 aa, Homo sapiens
  AACR GENIE Results; EGFR_p.V769L; A0301
SLDNPHVCRL

SEQ ID NO: 23859 - protein, 8 aa, Homo sapiens
  AACR GENIE Results; EGFR_p.V769L; B0801
EAYVMASL

SEQ ID NO: 23860 - protein, 9 aa, Homo sapiens
  AACR GENIE Results; EGFR_p.V769M; B1801
DEAYVMASM

SEQ ID NO: 23861 - protein, 9 aa, Homo sapiens
  AACR GENIE Results; EGFR_p.V769M; B3701
MDNPHVCRL

SEQ ID NO: 23862 - protein, 8 aa, Homo sapiens
  AACR GENIE Results; EGFR_p.V769M; B5101
EAYVMASM

SEQ ID NO: 23863 - protein, 10 aa, Homo sapiens
  AACR GENIE Results; EGFR_p.V769M; A3101
ASMDNPHVCR

SEQ ID NO: 23864 - protein, 8 aa, Homo sapiens
  AACR GENIE Results; EGFR_p.V769M; A3303
MDNPHVCR

SEQ ID NO: 23865 - protein, 9 aa, Homo sapiens
  AACR GENIE Results; EGFR_p.V769M; A3303
SMDNPHVCR

SEQ ID NO: 23866 - protein, 10 aa, Homo sapiens
  AACR GENIE Results; EGFR_p.V769M; A1101
ASMDNPHVCR

SEQ ID NO: 23867 - protein, 9 aa, Homo sapiens
  AACR GENIE Results; EGFR_p.V769M; A3001
ASMDNPHVC

SEQ ID NO: 23868 - protein, 10 aa, Homo sapiens
  AACR GENIE Results; EGFR_p.V769M; A3303
ASMDNPHVCR

SEQ ID NO: 23869 - protein, 9 aa, Homo sapiens
  AACR GENIE Results; EGFR_p.V769M; A3101
SMDNPHVCR

SEQ ID NO: 23870 - protein, 10 aa, Homo sapiens
  AACR GENIE Results; EGFR_p.V769M; A0201
VMASMDNPHV

SEQ ID NO: 23871 - protein, 10 aa, Homo sapiens
  AACR GENIE Results; EGFR_p.V769M; A6801
ASMDNPHVCR

SEQ ID NO: 23872 - protein, 9 aa, Homo sapiens
  AACR GENIE Results; EGFR_p.V769M; B4002
MDNPHVCRL

SEQ ID NO: 23873 - protein, 8 aa, Homo sapiens
  AACR GENIE Results; EGFR_p.V769M; A3301
MDNPHVCR

SEQ ID NO: 23874 - protein, 8 aa, Homo sapiens
  AACR GENIE Results; EGFR_p.V769M; B3501
EAYVMASM

SEQ ID NO: 23875 - protein, 11 aa, Homo sapiens
  AACR GENIE Results; EGFR_p.V769M; A1101
ASMDNPHVCRL

SEQ ID NO: 23876 - protein, 9 aa, Homo sapiens
  AACR GENIE Results; EGFR_p.V769M; A1101
SMDNPHVCR

SEQ ID NO: 23877 - protein, 8 aa, Homo sapiens
  AACR GENIE Results; EGFR_p.V769M; A3101
MDNPHVCR

SEQ ID NO: 23878 - protein, 10 aa, Homo sapiens
  AACR GENIE Results; EGFR_p.V769M; A0301
SMDNPHVCRL

SEQ ID NO: 23879 - protein, 10 aa, Homo sapiens
  AACR GENIE Results; EGFR_p.V769M; A3001
ASMDNPHVCR

SEQ ID NO: 23880 - protein, 8 aa, Homo sapiens
  AACR GENIE Results; EGFR_p.V769M; B0801
EAYVMASM

SEQ ID NO: 23881 - protein, 8 aa, Homo sapiens
  AACR GENIE Results; EGFR_p.V769M; A6801
MDNPHVCR

SEQ ID NO: 23882 - protein, 10 aa, Homo sapiens
  AACR GENIE Results; EGFR_p.V769M; A3301
ASMDNPHVCR

SEQ ID NO: 23883 - protein, 9 aa, Homo sapiens
  AACR GENIE Results; EGFR_p.V769M; A1101
ASMDNPHVC

SEQ ID NO: 23884 - protein, 9 aa, Homo sapiens
  AACR GENIE Results; EGFR_p.V769M; A6801
SMDNPHVCR

SEQ ID NO: 23885 - protein, 9 aa, Homo sapiens
  AACR GENIE Results; EGFR_p.V769M; B4002
DEAYVMASM

SEQ ID NO: 23886 - protein, 9 aa, Homo sapiens
  AACR GENIE Results; EGFR_p.V774M; B3501
MASVDNPHM

SEQ ID NO: 23887 - protein, 9 aa, Homo sapiens
  AACR GENIE Results; EGFR_p.V774M; A1101
SVDNPHMCR

SEQ ID NO: 23888 - protein, 10 aa, Homo sapiens
  AACR GENIE Results; EGFR_p.V774M; A0201
VMASVDNPHM

SEQ ID NO: 23889 - protein, 9 aa, Homo sapiens
  AACR GENIE Results; EGFR_p.V774M; C1601
MASVDNPHM

SEQ ID NO: 23890 - protein, 10 aa, Homo sapiens
  AACR GENIE Results; EGFR_p.V774M; C0501
SVDNPHMCRL

SEQ ID NO: 23891 - protein, 9 aa, Homo sapiens
  AACR GENIE Results; EGFR_p.V774M; C0304
MASVDNPHM

SEQ ID NO: 23892 - protein, 8 aa, Homo sapiens
  AACR GENIE Results; EGFR_p.V774M; A0301
VDNPHMCR

SEQ ID NO: 23893 - protein, 10 aa, Homo sapiens
  AACR GENIE Results; EGFR_p.V774M; A1101
SVDNPHMCRL

SEQ ID NO: 23894 - protein, 9 aa, Homo sapiens
  AACR GENIE Results; EGFR_p.V834L; A0301
YLEDRRLLH

SEQ ID NO: 23895 - protein, 9 aa, Homo sapiens
  AACR GENIE Results; EP300_p.H2324Pfs*55; B1501
SQPPPLQSF

SEQ ID NO: 23896 - protein, 9 aa, Homo sapiens
  AACR GENIE Results; EP300_p.H2324Pfs*55; B3501
QPGPEFNAF

SEQ ID NO: 23897 - protein, 9 aa, Homo sapiens
  AACR GENIE Results; EP300_p.H2324Pfs*55; B1501
GQPHGTRAF

SEQ ID NO: 23898 - protein, 9 aa, Homo sapiens
  AACR GENIE Results; EP300_p.H2324Pfs*55; B0702
FPKDAASAF

SEQ ID NO: 23899 - protein, 9 aa, Homo sapiens
  AACR GENIE Results; EP300_p.H2324Pfs*55; B3501
FPKDAASAF

SEQ ID NO: 23900 - protein, 10 aa, Homo sapiens
  AACR GENIE Results; EP300_p.H2324Pfs*55; B1501
CQPGPEFNAF

SEQ ID NO: 23901 - protein, 10 aa, Homo sapiens
  AACR GENIE Results; EP300_p.H2324Pfs*55; A6801
DAASAFSTPR

SEQ ID NO: 23902 - protein, 11 aa, Homo sapiens
  AACR GENIE Results; EP300_p.H2324Pfs*55; A1101
SQPPPLQSFPK

SEQ ID NO: 23903 - protein, 9 aa, Homo sapiens
  AACR GENIE Results; EP300_p.H2324Pfs*55; B0702
TPRFPTDKF

SEQ ID NO: 23904 - protein, 9 aa, Homo sapiens
  AACR GENIE Results; EP300_p.H2324Pfs*55; A3201
SQPPPLQSF

SEQ ID NO: 23905 - protein, 9 aa, Homo sapiens
  AACR GENIE Results; EP300_p.H2324Pfs*55; A6801
AASAFSTPR

SEQ ID NO: 23906 - protein, 9 aa, Homo sapiens
  AACR GENIE Results; EP300_p.H2324Pfs*55; B1501
FPKDAASAF

SEQ ID NO: 23907 - protein, 9 aa, Homo sapiens
  AACR GENIE Results; EP300_p.H2324Pfs*55; B0702
QPGPEFNAF

SEQ ID NO: 23908 - protein, 11 aa, Homo sapiens
  AACR GENIE Results; EP300_p.H2324Pfs*55; B1501
QSFPKDAASAF

SEQ ID NO: 23909 - protein, 9 aa, Homo sapiens
  AACR GENIE Results; EP300_p.H2324Pfs*55; A2402
SQPPPLQSF

SEQ ID NO: 23910 - protein, 9 aa, Homo sapiens
  AACR GENIE Results; EP300_p.H2324Pfs*55; A1101
AASAFSTPR

SEQ ID NO: 23911 - protein, 8 aa, Homo sapiens
  AACR GENIE Results; EP300_p.H2324Pfs*55; B5701
TDKFPTSW

SEQ ID NO: 23912 - protein, 11 aa, Homo sapiens
  AACR GENIE Results; EP300_p.H2324Pfs*55; B5701
QSFPKDAASAF

SEQ ID NO: 23913 - protein, 9 aa, Homo sapiens
  AACR GENIE Results; EP300_p.H2324Pfs*55; C0202
FPKDAASAF

SEQ ID NO: 23914 - protein, 10 aa, Homo sapiens
  AACR GENIE Results; EP300_p.H2324Pfs*55; B5701
QSQPPPLQSF

SEQ ID NO: 23915 - protein, 9 aa, Homo sapiens
  AACR GENIE Results; EP300_p.H2324Pfs*55; B5701
ASAFSTPRF

SEQ ID NO: 23916 - protein, 10 aa, Homo sapiens
  AACR GENIE Results; EP300_p.H2324Pfs*55; A2402
CQPGPEFNAF

SEQ ID NO: 23917 - protein, 9 aa, Homo sapiens
  AACR GENIE Results; EP300_p.H2324Pfs*55; B5101
FPKDAASAF

SEQ ID NO: 23918 - protein, 9 aa, Homo sapiens
  AACR GENIE Results; EP300_p.T858A; B1501
AQQPPATAI

SEQ ID NO: 23919 - protein, 11 aa, Homo sapiens
  AACR GENIE Results; EPHA5_p.A966E; B4402
AEHSPLGSGEY

SEQ ID NO: 23920 - protein, 8 aa, Homo sapiens
  AACR GENIE Results; EPHA5_p.A966E; B3501
SPLGSGEY

SEQ ID NO: 23921 - protein, 9 aa, Homo sapiens
  AACR GENIE Results; EPHA5_p.A966E; A0101
HSPLGSGEY

SEQ ID NO: 23922 - protein, 11 aa, Homo sapiens
  AACR GENIE Results; EPHA5_p.A966E; B0702
SPLGSGEYRSV

SEQ ID NO: 23923 - protein, 9 aa, Homo sapiens
  AACR GENIE Results; EPHA5_p.L255F; A0201
FLEVSGSCV

SEQ ID NO: 23924 - protein, 9 aa, Homo sapiens
  AACR GENIE Results; EPHA5_p.M427I; B1501
GLKNTSVIM

SEQ ID NO: 23925 - protein, 9 aa, Homo sapiens
  AACR GENIE Results; EPHA5_p.R227S; B1501
ALVSVSVYY

SEQ ID NO: 23926 - protein, 8 aa, Homo sapiens
  AACR GENIE Results; EPHA5_p.R227S; B1501
ALVSVSVY

SEQ ID NO: 23927 - protein, 9 aa, Homo sapiens
  AACR GENIE Results; EPHA5_p.R227S; B3501
IALVSVSVY

SEQ ID NO: 23928 - protein, 9 aa, Homo sapiens
  AACR GENIE Results; EPHA5_p.R227S; A2902
ALVSVSVYY

SEQ ID NO: 23929 - protein, 9 aa, Homo sapiens
  AACR GENIE Results; EPHA5_p.R227S; A1101
LVSVSVYYK

SEQ ID NO: 23930 - protein, 8 aa, Homo sapiens
  AACR GENIE Results; EPHA5_p.R227S; B5101
IALVSVSV

SEQ ID NO: 23931 - protein, 8 aa, Homo sapiens
  AACR GENIE Results; EPHA5_p.R227S; A1101
VSVSVYYK

SEQ ID NO: 23932 - protein, 9 aa, Homo sapiens
  AACR GENIE Results; EPHA5_p.R227S; B1501
IALVSVSVY

SEQ ID NO: 23933 - protein, 9 aa, Homo sapiens
  AACR GENIE Results; EPHA5_p.R227S; A1101
VSVSVYYKK

SEQ ID NO: 23934 - protein, 9 aa, Homo sapiens
  AACR GENIE Results; EPHA5_p.R227S; A0301
LVSVSVYYK

SEQ ID NO: 23935 - protein, 10 aa, Homo sapiens
  AACR GENIE Results; EPHA5_p.R227S; B5701
IALVSVSVYY

SEQ ID NO: 23936 - protein, 8 aa, Homo sapiens
  AACR GENIE Results; EPHA5_p.R227S; B1501
LVSVSVYY

SEQ ID NO: 23937 - protein, 9 aa, Homo sapiens
  AACR GENIE Results; EPHA5_p.R227S; A0301
ALVSVSVYY

SEQ ID NO: 23938 - protein, 10 aa, Homo sapiens
  AACR GENIE Results; EPHA5_p.R853Q; A6801
TAPEAIAFQK

SEQ ID NO: 23939 - protein, 9 aa, Homo sapiens
  AACR GENIE Results; EPHA5_p.R853Q; A2301
PEAIAFQKF

SEQ ID NO: 23940 - protein, 9 aa, Homo sapiens
  AACR GENIE Results; EPHA5_p.R853Q; C0304
IAFQKFTSA

SEQ ID NO: 23941 - protein, 9 aa, Homo sapiens
  AACR GENIE Results; EPHA5_p.R853Q; C0303
IAFQKFTSA

SEQ ID NO: 23942 - protein, 9 aa, Homo sapiens
  AACR GENIE Results; EPHA5_p.R853Q; B0801
IAFQKFTSA

SEQ ID NO: 23943 - protein, 9 aa, Homo sapiens
  AACR GENIE Results; EPHA5_p.W844C; B1501
CTAPEAIAF

SEQ ID NO: 23944 - protein, 10 aa, Homo sapiens
  AACR GENIE Results; EPHA5_p.W844C; A6801
CTAPEAIAFR

SEQ ID NO: 23945 - protein, 11 aa, Homo sapiens
  AACR GENIE Results; EPHA5_p.W844C; A1101
CTAPEAIAFRK

SEQ ID NO: 23946 - protein, 9 aa, Homo sapiens
  AACR GENIE Results; EPHA5_p.W844C; A1101
CTAPEAIAF

SEQ ID NO: 23947 - protein, 9 aa, Homo sapiens
  AACR GENIE Results; EPHA5_p.W844C; B3501
CTAPEAIAF

SEQ ID NO: 23948 - protein, 9 aa, Homo sapiens
  AACR GENIE Results; EPHA7_p.R486M; B0801
DQMERTYST

SEQ ID NO: 23949 - protein, 10 aa, Homo sapiens
  AACR GENIE Results; EPHA7_p.R486M; B4402
YEKDQMERTY

SEQ ID NO: 23950 - protein, 10 aa, Homo sapiens
  AACR GENIE Results; EPHA7_p.R69Q; B1801
DENYTPIQTY

SEQ ID NO: 23951 - protein, 10 aa, Homo sapiens
  AACR GENIE Results; EPHA7_p.R69Q; B4403
DENYTPIQTY

SEQ ID NO: 23952 - protein, 10 aa, Homo sapiens
  AACR GENIE Results; EPHA7_p.R69Q; B4402
DENYTPIQTY

SEQ ID NO: 23953 - protein, 8 aa, Homo sapiens
  AACR GENIE Results; EPHA7_p.R69Q; B5101
TPIQTYQV

SEQ ID NO: 23954 - protein, 9 aa, Homo sapiens
  AACR GENIE Results; EPHB1_p.A922T; A3101
STIKMVQYR

SEQ ID NO: 23955 - protein, 9 aa, Homo sapiens
  AACR GENIE Results; EPHB1_p.A922T; C0802
TVDDWLSTI

SEQ ID NO: 23956 - protein, 9 aa, Homo sapiens
  AACR GENIE Results; EPHB1_p.A922T; C1601
LSTIKMVQY

SEQ ID NO: 23957 - protein, 9 aa, Homo sapiens
  AACR GENIE Results; EPHB1_p.A922T; A1101
STIKMVQYR

SEQ ID NO: 23958 - protein, 8 aa, Homo sapiens
  AACR GENIE Results; EPHB1_p.A922T; B1501
STIKMVQY

SEQ ID NO: 23959 - protein, 9 aa, Homo sapiens
  AACR GENIE Results; EPHB1_p.A922T; A6801
STIKMVQYR

SEQ ID NO: 23960 - protein, 10 aa, Homo sapiens
  AACR GENIE Results; EPHB1_p.R222Q; A6802
STSLVIAQGT

SEQ ID NO: 23961 - protein, 10 aa, Homo sapiens
  AACR GENIE Results; ERBB2_p.D769Y; A0301
ILYEAYVMAG

SEQ ID NO: 23962 - protein, 8 aa, Homo sapiens
  AACR GENIE Results; ERBB2_p.G776V; B1801
DEAYVMAV

SEQ ID NO: 23963 - protein, 10 aa, Homo sapiens
  AACR GENIE Results; ERBB2_p.G776V; A6801
AVVGSPYVSR

SEQ ID NO: 23964 - protein, 8 aa, Homo sapiens
  AACR GENIE Results; ERBB2_p.G776V; B5101
EAYVMAVV

SEQ ID NO: 23965 - protein, 9 aa, Homo sapiens
  AACR GENIE Results; ERBB2_p.G776V; A3101
VVGSPYVSR

SEQ ID NO: 23966 - protein, 9 aa, Homo sapiens
  AACR GENIE Results; ERBB2_p.G776V; A6801
VVGSPYVSR

SEQ ID NO: 23967 - protein, 9 aa, Homo sapiens
  AACR GENIE Results; ERBB2_p.G776V; B1501
VMAVVGSPY

SEQ ID NO: 23968 - protein, 9 aa, Homo sapiens
  AACR GENIE Results; ERBB2_p.G776V; A1101
VVGSPYVSR

SEQ ID NO: 23969 - protein, 10 aa, Homo sapiens
  AACR GENIE Results; ERBB2_p.G776V; A1101
AVVGSPYVSR

SEQ ID NO: 23970 - protein, 9 aa, Homo sapiens
  AACR GENIE Results; ERBB2_p.G776V; A0301
VVGSPYVSR

SEQ ID NO: 23971 - protein, 9 aa, Homo sapiens
  AACR GENIE Results; ERBB2_p.G776V; B1801
DEAYVMAVV

SEQ ID NO: 23972 - protein, 10 aa, Homo sapiens
  AACR GENIE Results; ERBB2_p.G776V; A0201
ILDEAYVMAV

SEQ ID NO: 23973 - protein, 10 aa, Homo sapiens
  AACR GENIE Results; ERBB2_p.G776V; A3101
AVVGSPYVSR

SEQ ID NO: 23974 - protein, 9 aa, Homo sapiens
  AACR GENIE Results; ERBB2_p.G776V; B5101
MAVVGSPYV

SEQ ID NO: 23975 - protein, 11 aa, Homo sapiens
  AACR GENIE Results; ERBB2_p.G776V; A6801
MAVVGSPYVSR

SEQ ID NO: 23976 - protein, 10 aa, Homo sapiens
  AACR GENIE Results; ERBB2_p.G776V; A0301
AVVGSPYVSR

SEQ ID NO: 23977 - protein, 10 aa, Homo sapiens
  AACR GENIE Results; ERBB2_p.G776V; B3501
YVMAVVGSPY

SEQ ID NO: 23978 - protein, 10 aa, Homo sapiens
  AACR GENIE Results; ERBB2_p.G776V; B1801
DEAYVMAVVG

SEQ ID NO: 23979 - protein, 8 aa, Homo sapiens
  AACR GENIE Results; ERBB2_p.G776V; B1302
AVVGSPYV

SEQ ID NO: 23980 - protein, 10 aa, Homo sapiens
  AACR GENIE Results; ERBB2_p.G776V; A2601
YVMAVVGSPY

SEQ ID NO: 23981 - protein, 9 aa, Homo sapiens
  AACR GENIE Results; ERBB2_p.G776V; A2902
VMAVVGSPY

SEQ ID NO: 23982 - protein, 10 aa, Homo sapiens
  AACR GENIE Results; ERBB2_p.G776V; A0201
VMAVVGSPYV

SEQ ID NO: 23983 - protein, 8 aa, Homo sapiens
  AACR GENIE Results; ERBB2_p.G776V; B3501
MAVVGSPY

SEQ ID NO: 23984 - protein, 10 aa, Homo sapiens
  AACR GENIE Results; ERBB2_p.G776V; B1501
YVMAVVGSPY

SEQ ID NO: 23985 - protein, 10 aa, Homo sapiens
  AACR GENIE Results; ERBB2_p.G776V; A2601
AVVGSPYVSR

SEQ ID NO: 23986 - protein, 11 aa, Homo sapiens
  AACR GENIE Results; ERBB2_p.G778_P780dup; A3101
VGSPGSPYVSR

SEQ ID NO: 23987 - protein, 9 aa, Homo sapiens
  AACR GENIE Results; ERBB2_p.G778_P780dup; B1501
GVGSPGSPY

SEQ ID NO: 23988 - protein, 11 aa, Homo sapiens
  AACR GENIE Results; ERBB2_p.G778_P780dup; A6801
VGSPGSPYVSR

SEQ ID NO: 23989 - protein, 9 aa, Homo sapiens
  AACR GENIE Results; ERBB2_p.G778_P780dup; B5101
VGSPGSPYV

SEQ ID NO: 23990 - protein, 10 aa, Homo sapiens
  AACR GENIE Results; ERBB2_p.G778_P780dup; B1501
AGVGSPGSPY

SEQ ID NO: 23991 - protein, 9 aa, Homo sapiens
  AACR GENIE Results; ERBB2_p.G778_P780dup; B1302
VGSPGSPYV

SEQ ID NO: 23992 - protein, 9 aa, Homo sapiens
  AACR GENIE Results; ERBB2_p.G778_P780dup; A6801
SPGSPYVSR

SEQ ID NO: 23993 - protein, 10 aa, Homo sapiens
  AACR GENIE Results; ERBB2_p.G778_P780dup; B0702
SPGSPYVSRL

SEQ ID NO: 23994 - protein, 10 aa, Homo sapiens
  AACR GENIE Results; ERBB2_p.G778_P780dup; A6801
GSPGSPYVSR

SEQ ID NO: 23995 - protein, 9 aa, Homo sapiens
  AACR GENIE Results; ERBB2_p.G778_P780dup; A0201
VGSPGSPYV

SEQ ID NO: 23996 - protein, 11 aa, Homo sapiens
  AACR GENIE Results; ERBB2_p.G778_P780dup; A1101
VGSPGSPYVSR

SEQ ID NO: 23997 - protein, 10 aa, Homo sapiens
  AACR GENIE Results; ERBB2_p.G778_P780dup; B3501
AGVGSPGSPY

SEQ ID NO: 23998 - protein, 10 aa, Homo sapiens
  AACR GENIE Results; ERBB2_p.L755A; A0301
KVARENTSPK

SEQ ID NO: 23999 - protein, 9 aa, Homo sapiens
  AACR GENIE Results; ERBB2_p.L755A; A0301
VARENTSPK

SEQ ID NO: 24000 - protein, 9 aa, Homo sapiens
  AACR GENIE Results; ERBB2_p.L755P; A6801
IPVAIKVPR

SEQ ID NO: 24001 - protein, 10 aa, Homo sapiens
  AACR GENIE Results; ERBB2_p.L755P; A0301
KVPRENTSPK

SEQ ID NO: 24002 - protein, 10 aa, Homo sapiens
  AACR GENIE Results; ERBB2_p.L755P; B0702
VPRENTSPKA

SEQ ID NO: 24003 - protein, 10 aa, Homo sapiens
  AACR GENIE Results; ERBB2_p.L755P; A1101
KVPRENTSPK

SEQ ID NO: 24004 - protein, 9 aa, Homo sapiens
  AACR GENIE Results; ERBB2_p.L755S; A6801
IPVAIKVSR

SEQ ID NO: 24005 - protein, 9 aa, Homo sapiens
  AACR GENIE Results; ERBB2_p.L755S; A0301
VSRENTSPK

SEQ ID NO: 24006 - protein, 9 aa, Homo sapiens
  AACR GENIE Results; ERBB2_p.Q709L; B0702
TPSGAMPNL

SEQ ID NO: 24007 - protein, 9 aa, Homo sapiens
  AACR GENIE Results; ERBB2_p.Q709L; B3501
TPSGAMPNL

SEQ ID NO: 24008 - protein, 8 aa, Homo sapiens
  AACR GENIE Results; ERBB2_p.R678Q; B1501
QQQKIRKY

SEQ ID NO: 24009 - protein, 9 aa, Homo sapiens
  AACR GENIE Results; ERBB2_p.S310F; C0802
STDVGFCTL

SEQ ID NO: 24010 - protein, 9 aa, Homo sapiens
  AACR GENIE Results; ERBB2_p.S310F; A2301
NYLSTDVGF

SEQ ID NO: 24011 - protein, 9 aa, Homo sapiens
  AACR GENIE Results; ERBB2_p.S310F; C0501
STDVGFCTL

SEQ ID NO: 24012 - protein, 9 aa, Homo sapiens
  AACR GENIE Results; ERBB2_p.S310F; A2402
NYLSTDVGF

SEQ ID NO: 24013 - protein, 9 aa, Homo sapiens
  AACR GENIE Results; ERBB2_p.S310F; C0304
STDVGFCTL

SEQ ID NO: 24014 - protein, 9 aa, Homo sapiens
  AACR GENIE Results; ERBB2_p.V659E; C1203
SAVEGILLV

SEQ ID NO: 24015 - protein, 9 aa, Homo sapiens
  AACR GENIE Results; ERBB2_p.V659E; B5101
SAVEGILLV

SEQ ID NO: 24016 - protein, 8 aa, Homo sapiens
  AACR GENIE Results; ERBB2_p.V659E; C0304
SAVEGILL

SEQ ID NO: 24017 - protein, 9 aa, Homo sapiens
  AACR GENIE Results; ERBB2_p.V659E; A0201
SIISAVEGI

SEQ ID NO: 24018 - protein, 9 aa, Homo sapiens
  AACR GENIE Results; ERBB2_p.V777L; B1801
DEAYVMAGL

SEQ ID NO: 24019 - protein, 9 aa, Homo sapiens
  AACR GENIE Results; ERBB2_p.V777L; B1501
VMAGLGSPY

SEQ ID NO: 24020 - protein, 8 aa, Homo sapiens
  AACR GENIE Results; ERBB2_p.V777L; B5101
EAYVMAGL

SEQ ID NO: 24021 - protein, 10 aa, Homo sapiens
  AACR GENIE Results; ERBB2_p.V777L; A2601
YVMAGLGSPY

SEQ ID NO: 24022 - protein, 10 aa, Homo sapiens
  AACR GENIE Results; ERBB2_p.V777L; A3101
AGLGSPYVSR

SEQ ID NO: 24023 - protein, 9 aa, Homo sapiens
  AACR GENIE Results; ERBB2_p.V777L; A3101
GLGSPYVSR

SEQ ID NO: 24024 - protein, 10 aa, Homo sapiens
  AACR GENIE Results; ERBB2_p.V777L; A0201
VMAGLGSPYV

SEQ ID NO: 24025 - protein, 9 aa, Homo sapiens
  AACR GENIE Results; ERBB2_p.V777L; A0301
GLGSPYVSR

SEQ ID NO: 24026 - protein, 10 aa, Homo sapiens
  AACR GENIE Results; ERBB2_p.V777L; B1501
YVMAGLGSPY

SEQ ID NO: 24027 - protein, 11 aa, Homo sapiens
  AACR GENIE Results; ERBB2_p.V777L; A3303
MAGLGSPYVSR

SEQ ID NO: 24028 - protein, 9 aa, Homo sapiens
  AACR GENIE Results; ERBB2_p.V777L; B2702
GLGSPYVSR

SEQ ID NO: 24029 - protein, 11 aa, Homo sapiens
  AACR GENIE Results; ERBB2_p.V777L; A6801
MAGLGSPYVSR

SEQ ID NO: 24030 - protein, 8 aa, Homo sapiens
  AACR GENIE Results; ERBB2_p.V777L; B1302
AGLGSPYV

SEQ ID NO: 24031 - protein, 10 aa, Homo sapiens
  AACR GENIE Results; ERBB2_p.V777L; B2702
AGLGSPYVSR

SEQ ID NO: 24032 - protein, 10 aa, Homo sapiens
  AACR GENIE Results; ERBB2_p.V777L; B3501
YVMAGLGSPY

SEQ ID NO: 24033 - protein, 10 aa, Homo sapiens
  AACR GENIE Results; ERBB2_p.V777L; A0301
GLGSPYVSRL

SEQ ID NO: 24034 - protein, 9 aa, Homo sapiens
  AACR GENIE Results; ERBB2_p.V842I; A2402
SYLEDVRLI

SEQ ID NO: 24035 - protein, 9 aa, Homo sapiens
  AACR GENIE Results; ERBB2_p.V842I; A2301
SYLEDVRLI

SEQ ID NO: 24036 - protein, 11 aa, Homo sapiens
  AACR GENIE Results; ERBB2_p.V842I; A3101
SYLEDVRLIHR

SEQ ID NO: 24037 - protein, 9 aa, Homo sapiens
  AACR GENIE Results; ERBB2_p.V842I; C0602
SYLEDVRLI

SEQ ID NO: 24038 - protein, 9 aa, Homo sapiens
  AACR GENIE Results; ERBB2_p.V842I; C1402
SYLEDVRLI

SEQ ID NO: 24039 - protein, 11 aa, Homo sapiens
  AACR GENIE Results; ERBB2_p.V842I; A3303
SYLEDVRLIHR

SEQ ID NO: 24040 - protein, 8 aa, Homo sapiens
  AACR GENIE Results; ERBB2_p.Y772_A775dup; B1801
DEAYVMAY

SEQ ID NO: 24041 - protein, 8 aa, Homo sapiens
  AACR GENIE Results; ERBB2_p.Y772_A775dup; B5101
EAYVMAYV

SEQ ID NO: 24042 - protein, 10 aa, Homo sapiens
  AACR GENIE Results; ERBB2_p.Y772_A775dup; A0101
ILDEAYVMAY

SEQ ID NO: 24043 - protein, 8 aa, Homo sapiens
  AACR GENIE Results; ERBB2_p.Y772_A775dup; B5101
MAYVMAGV

SEQ ID NO: 24044 - protein, 9 aa, Homo sapiens
  AACR GENIE Results; ERBB2_p.Y772_A775dup; B3501
EAYVMAYVM

SEQ ID NO: 24045 - protein, 9 aa, Homo sapiens
  AACR GENIE Results; ERBB2_p.Y772_A775dup; B1502
EAYVMAYVM

SEQ ID NO: 24046 - protein, 9 aa, Homo sapiens
  AACR GENIE Results; ERBB2_p.Y772_A775dup; B3503
EAYVMAYVM

SEQ ID NO: 24047 - protein, 9 aa, Homo sapiens
  AACR GENIE Results; ERBB2_p.Y772_A775dup; B5101
EAYVMAYVM

SEQ ID NO: 24048 - protein, 9 aa, Homo sapiens
  AACR GENIE Results; ERBB2_p.Y772_A775dup; A0201
VMAYVMAGV

SEQ ID NO: 24049 - protein, 9 aa, Homo sapiens
  AACR GENIE Results; ERBB2_p.Y772_A775dup; A6802
DEAYVMAYV

SEQ ID NO: 24050 - protein, 8 aa, Homo sapiens
  AACR GENIE Results; ERBB2_p.Y772_A775dup; C0302
DEAYVMAY

SEQ ID NO: 24051 - protein, 9 aa, Homo sapiens
  AACR GENIE Results; ERBB2_p.Y772_A775dup; C0801
EAYVMAYVM

SEQ ID NO: 24052 - protein, 10 aa, Homo sapiens
  AACR GENIE Results; ERBB2_p.Y772_A775dup; B1801
DEAYVMAYVM

SEQ ID NO: 24053 - protein, 8 aa, Homo sapiens
  AACR GENIE Results; ERBB2_p.Y772_A775dup; A2301
DEAYVMAY

SEQ ID NO: 24054 - protein, 8 aa, Homo sapiens
  AACR GENIE Results; ERBB2_p.Y772_A775dup; B1502
DEAYVMAY

SEQ ID NO: 24055 - protein, 8 aa, Homo sapiens
  AACR GENIE Results; ERBB2_p.Y772_A775dup; C1402
AYVMAYVM

SEQ ID NO: 24056 - protein, 9 aa, Homo sapiens
  AACR GENIE Results; ERBB2_p.Y772_A775dup; B1302
VMAYVMAGV

SEQ ID NO: 24057 - protein, 8 aa, Homo sapiens
  AACR GENIE Results; ERBB2_p.Y772_A775dup; B4403
DEAYVMAY

SEQ ID NO: 24058 - protein, 11 aa, Homo sapiens
  AACR GENIE Results; ERBB2_p.Y772_A775dup; A2601
EILDEAYVMAY

SEQ ID NO: 24059 - protein, 9 aa, Homo sapiens
  AACR GENIE Results; ERBB2_p.Y772_A775dup; A6802
EAYVMAYVM

SEQ ID NO: 24060 - protein, 9 aa, Homo sapiens
  AACR GENIE Results; ERBB2_p.Y772_A775dup; B4901
DEAYVMAYV

SEQ ID NO: 24061 - protein, 8 aa, Homo sapiens
  AACR GENIE Results; ERBB2_p.Y772_A775dup; B5801
DEAYVMAY

SEQ ID NO: 24062 - protein, 9 aa, Homo sapiens
  AACR GENIE Results; ERBB2_p.Y772_A775dup; B1801
LDEAYVMAY

SEQ ID NO: 24063 - protein, 8 aa, Homo sapiens
  AACR GENIE Results; ERBB2_p.Y772_A775dup; A2301
AYVMAYVM

SEQ ID NO: 24064 - protein, 10 aa, Homo sapiens
  AACR GENIE Results; ERBB2_p.Y772_A775dup; A6802
YVMAYVMAGV

SEQ ID NO: 24065 - protein, 10 aa, Homo sapiens
  AACR GENIE Results; ERBB2_p.Y772_A775dup; B1502
ILDEAYVMAY

SEQ ID NO: 24066 - protein, 9 aa, Homo sapiens
  AACR GENIE Results; ERBB3_p.D297Y; A0301
VVYQTSCVR

SEQ ID NO: 24067 - protein, 9 aa, Homo sapiens
  AACR GENIE Results; ERBB3_p.D297Y; A3101
VVYQTSCVR

SEQ ID NO: 24068 - protein, 9 aa, Homo sapiens
  AACR GENIE Results; ERBB3_p.D297Y; A1101
VVYQTSCVR

SEQ ID NO: 24069 - protein, 8 aa, Homo sapiens
  AACR GENIE Results; ERBB3_p.D297Y; B5101
VVYQTSCV

SEQ ID NO: 24070 - protein, 8 aa, Homo sapiens
  AACR GENIE Results; ERBB3_p.D297Y; B3501
CPHNFVVY

SEQ ID NO: 24071 - protein, 9 aa, Homo sapiens
  AACR GENIE Results; ERBB3_p.D297Y; A6801
VVYQTSCVR

SEQ ID NO: 24072 - protein, 9 aa, Homo sapiens
  AACR GENIE Results; ERBB3_p.I649R; C0602
VRAGLVVIF

SEQ ID NO: 24073 - protein, 9 aa, Homo sapiens
  AACR GENIE Results; ERBB3_p.I649R; C0702
VRAGLVVIF

SEQ ID NO: 24074 - protein, 9 aa, Homo sapiens
  AACR GENIE Results; ERBB3_p.S846I; A0201
VLLKSPIQV

SEQ ID NO: 24075 - protein, 10 aa, Homo sapiens
  AACR GENIE Results; ERBB3_p.S846I; B3501
SPIQVQVADF

SEQ ID NO: 24076 - protein, 9 aa, Homo sapiens
  AACR GENIE Results; ERBB3_p.S846I; C0602
LKSPIQVQV

SEQ ID NO: 24077 - protein, 9 aa, Homo sapiens
  AACR GENIE Results; ERBB3_p.V104L; B5101
LPLPNLRLV

SEQ ID NO: 24078 - protein, 9 aa, Homo sapiens
  AACR GENIE Results; ERBB3_p.V104L; B1501
RLVRGTQVY

SEQ ID NO: 24079 - protein, 8 aa, Homo sapiens
  AACR GENIE Results; ERBB3_p.V104L; B1501
LVRGTQVY

SEQ ID NO: 24080 - protein, 9 aa, Homo sapiens
  AACR GENIE Results; ERBB3_p.V104M; B5101
LPLPNLRMV

SEQ ID NO: 24081 - protein, 8 aa, Homo sapiens
  AACR GENIE Results; ERBB3_p.V104M; B1501
MVRGTQVY

SEQ ID NO: 24082 - protein, 9 aa, Homo sapiens
  AACR GENIE Results; ERBB3_p.V104M; B1501
RMVRGTQVY

SEQ ID NO: 24083 - protein, 8 aa, Homo sapiens
  AACR GENIE Results; ERBB3_p.V104M; A2601
MVRGTQVY

SEQ ID NO: 24084 - protein, 9 aa, Homo sapiens
  AACR GENIE Results; ERBB4_p.E1201K; A2402
KYVNEPLYL

SEQ ID NO: 24085 - protein, 9 aa, Homo sapiens
  AACR GENIE Results; ERBB4_p.E1201K; C0702
KYVNEPLYL

SEQ ID NO: 24086 - protein, 9 aa, Homo sapiens
  AACR GENIE Results; ERBB4_p.E1201K; C0602
KYVNEPLYL

SEQ ID NO: 24087 - protein, 9 aa, Homo sapiens
  AACR GENIE Results; ERBB4_p.R1040T; C0501
TIDSNRSEI

SEQ ID NO: 24088 - protein, 9 aa, Homo sapiens
  AACR GENIE Results; ERBB4_p.R1040T; B0702
TIDSNRSEI

SEQ ID NO: 24089 - protein, 8 aa, Homo sapiens
  AACR GENIE Results; ERBB4_p.R847H; B1402
DLAAHNVL

SEQ ID NO: 24090 - protein, 8 aa, Homo sapiens
  AACR GENIE Results; ERBB4_p.R847H; B0801
DLAAHNVL

SEQ ID NO: 24091 - protein, 8 aa, Homo sapiens
  AACR GENIE Results; ERBB4_p.R847H; B3701
RDLAAHNV

SEQ ID NO: 24092 - protein, 9 aa, Homo sapiens
  AACR GENIE Results; ERBB4_p.R847H; B3701
RDLAAHNVL

SEQ ID NO: 24093 - protein, 8 aa, Homo sapiens
  AACR GENIE Results; ERBB4_p.R847H; A1101
AAHNVLVK

SEQ ID NO: 24094 - protein, 9 aa, Homo sapiens
  AACR GENIE Results; ERBB4_p.R847H; B4002
RDLAAHNVL

SEQ ID NO: 24095 - protein, 9 aa, Homo sapiens
  AACR GENIE Results; ERBB4_p.R847H; A6802
DLAAHNVLV

SEQ ID NO: 24096 - protein, 8 aa, Homo sapiens
  AACR GENIE Results; ERBB4_p.R847H; A0301
AAHNVLVK

SEQ ID NO: 24097 - protein, 9 aa, Homo sapiens
  AACR GENIE Results; ERBB4_p.R847H; B1402
RDLAAHNVL

SEQ ID NO: 24098 - protein, 9 aa, Homo sapiens
  AACR GENIE Results; ERBB4_p.S1046I; C0501
RIDSNRIEI

SEQ ID NO: 24099 - protein, 11 aa, Homo sapiens
  AACR GENIE Results; ERBB4_p.S1046I; B4403
IEIGHSPPPAY

SEQ ID NO: 24100 - protein, 9 aa, Homo sapiens
  AACR GENIE Results; ERBB4_p.S1046I; A0301
RIDSNRIEI

SEQ ID NO: 24101 - protein, 11 aa, Homo sapiens
  AACR GENIE Results; ERBB4_p.S1046I; B1501
IEIGHSPPPAY

SEQ ID NO: 24102 - protein, 9 aa, Homo sapiens
  AACR GENIE Results; ERBB4_p.S774R; B1801
DEALIMARM

SEQ ID NO: 24103 - protein, 9 aa, Homo sapiens
  AACR GENIE Results; ERBB4_p.S774R; C0602
ARMDHPHLV

SEQ ID NO: 24104 - protein, 9 aa, Homo sapiens
  AACR GENIE Results; ERBB4_p.S774R; B2705
ARMDHPHLV

SEQ ID NO: 24105 - protein, 8 aa, Homo sapiens
  AACR GENIE Results; ERBB4_p.S774R; B1801
DEALIMAR

SEQ ID NO: 24106 - protein, 9 aa, Homo sapiens
  AACR GENIE Results; ERBB4_p.S774R; B4403
DEALIMARM

SEQ ID NO: 24107 - protein, 8 aa, Homo sapiens
  AACR GENIE Results; ERBB4_p.S774R; B5101
EALIMARM

SEQ ID NO: 24108 - protein, 9 aa, Homo sapiens
  AACR GENIE Results; ERBB4_p.S774R; A2301
DEALIMARM

SEQ ID NO: 24109 - protein, 9 aa, Homo sapiens
  AACR GENIE Results; ERBB4_p.S774R; A3101
RMDHPHLVR

SEQ ID NO: 24110 - protein, 9 aa, Homo sapiens
  AACR GENIE Results; ERBB4_p.S774R; A0301
RMDHPHLVR

SEQ ID NO: 24111 - protein, 8 aa, Homo sapiens
  AACR GENIE Results; ERBB4_p.T926M; B5101
DGIPMREI

SEQ ID NO: 24112 - protein, 9 aa, Homo sapiens
  AACR GENIE Results; ERBB4_p.T926M; B3501
IPMREIPDL

SEQ ID NO: 24113 - protein, 9 aa, Homo sapiens
  AACR GENIE Results; ERCC3_p.G587V; A0201
YIYGPTSQV

SEQ ID NO: 24114 - protein, 11 aa, Homo sapiens
  AACR GENIE Results; ERCC3_p.G587V; A1101
YIYGPTSQVER

SEQ ID NO: 24115 - protein, 9 aa, Homo sapiens
  AACR GENIE Results; ERCC3_p.G587V; B3501
GPTSQVERM

SEQ ID NO: 24116 - protein, 11 aa, Homo sapiens
  AACR GENIE Results; ERCC3_p.G587V; A2402
IYGPTSQVERM

SEQ ID NO: 24117 - protein, 8 aa, Homo sapiens
  AACR GENIE Results; ERCC4_p.E527D; B1801
DEIKHEEF

SEQ ID NO: 24118 - protein, 9 aa, Homo sapiens
  AACR GENIE Results; ERCC4_p.Q322H; B5701
KAFGHNSGW

SEQ ID NO: 24119 - protein, 8 aa, Homo sapiens
  AACR GENIE Results; ERCC4_p.Q406R; C0304
LGGPGRVL

SEQ ID NO: 24120 - protein, 11 aa, Homo sapiens
  AACR GENIE Results; ERCC4_p.Q406R; B4001
SEALGGPGRVL

SEQ ID NO: 24121 - protein, 10 aa, Homo sapiens
  AACR GENIE Results; ERCC4_p.R618H; B4001
TEEQHYLTAL

SEQ ID NO: 24122 - protein, 9 aa, Homo sapiens
  AACR GENIE Results; ERCC4_p.R618H; B1801
EEQHYLTAL

SEQ ID NO: 24123 - protein, 9 aa, Homo sapiens
  AACR GENIE Results; ERCC4_p.R618H; B4001
EEQHYLTAL

SEQ ID NO: 24124 - protein, 9 aa, Homo sapiens
  AACR GENIE Results; ERCC4_p.S540L; B4403
EEFDVNLSL

SEQ ID NO: 24125 - protein, 9 aa, Homo sapiens
  AACR GENIE Results; ERCC4_p.S540L; B4001
EEFDVNLSL

SEQ ID NO: 24126 - protein, 9 aa, Homo sapiens
  AACR GENIE Results; ERCC4_p.S540L; B1801
EEFDVNLSL

SEQ ID NO: 24127 - protein, 10 aa, Homo sapiens
  AACR GENIE Results; ERCC4_p.S540L; A1101
SLDAAFGILK

SEQ ID NO: 24128 - protein, 9 aa, Homo sapiens
  AACR GENIE Results; ERCC5_p.T105A; C0602
SRKATEKLL

SEQ ID NO: 24129 - protein, 11 aa, Homo sapiens
  AACR GENIE Results; ERCC5_p.T105A; A1101
ATEKLLKTFLK

SEQ ID NO: 24130 - protein, 9 aa, Homo sapiens
  AACR GENIE Results; ERG_p.E39Q; B0702
TPHLAKTQM

SEQ ID NO: 24131 - protein, 11 aa, Homo sapiens
  AACR GENIE Results; ERG_p.E39Q; B1501
TQMTASSSSDY

SEQ ID NO: 24132 - protein, 9 aa, Homo sapiens
  AACR GENIE Results; ERG_p.E39Q; B3501
TPHLAKTQM

SEQ ID NO: 24133 - protein, 9 aa, Homo sapiens
  AACR GENIE Results; ERG_p.E39Q; B0801
TPHLAKTQM

SEQ ID NO: 24134 - protein, 10 aa, Homo sapiens
  AACR GENIE Results; ERG_p.E39Q; B1501
QMTASSSSDY

SEQ ID NO: 24135 - protein, 11 aa, Homo sapiens
  AACR GENIE Results; ESR1_p.L35M; B3501
IPMERPLGEVY

SEQ ID NO: 24136 - protein, 9 aa, Homo sapiens
  AACR GENIE Results; ESR1_p.L35M; B1801
MERPLGEVY

SEQ ID NO: 24137 - protein, 10 aa, Homo sapiens
  AACR GENIE Results; ESR1_p.L35M; B5101
IPMERPLGEV

SEQ ID NO: 24138 - protein, 9 aa, Homo sapiens
  AACR GENIE Results; ESR1_p.L35M; B4403
MERPLGEVY

SEQ ID NO: 24139 - protein, 9 aa, Homo sapiens
  AACR GENIE Results; ESR1_p.L35M; B4402
MERPLGEVY

SEQ ID NO: 24140 - protein, 10 aa, Homo sapiens
  AACR GENIE Results; ESR1_p.L35M; B0702
IPMERPLGEV

SEQ ID NO: 24141 - protein, 9 aa, Homo sapiens
  AACR GENIE Results; ESR1_p.S106G; C0102
VSPGPLMLL

SEQ ID NO: 24142 - protein, 9 aa, Homo sapiens
  AACR GENIE Results; ESR1_p.S106G; C0304
NSVSPGPLM

SEQ ID NO: 24143 - protein, 9 aa, Homo sapiens
  AACR GENIE Results; ESR1_p.S106G; C0303
NSVSPGPLM

SEQ ID NO: 24144 - protein, 10 aa, Homo sapiens
  AACR GENIE Results; ESR1_p.T311M; A0201
SLMADQMVSA

SEQ ID NO: 24145 - protein, 9 aa, Homo sapiens
  AACR GENIE Results; ESR1_p.T311M; C0501
MADQMVSAL

SEQ ID NO: 24146 - protein, 9 aa, Homo sapiens
  AACR GENIE Results; ESR1_p.T311M; A0201
LMADQMVSA

SEQ ID NO: 24147 - protein, 9 aa, Homo sapiens
  AACR GENIE Results; ESR1_p.T311M; B3501
MADQMVSAL

SEQ ID NO: 24148 - protein, 9 aa, Homo sapiens
  AACR GENIE Results; ESR1_p.T311M; C0304
MADQMVSAL

SEQ ID NO: 24149 - protein, 9 aa, Homo sapiens
  AACR GENIE Results; ETV1_p.R205M; B3501
MPMEGRPMY

SEQ ID NO: 24150 - protein, 9 aa, Homo sapiens
  AACR GENIE Results; ETV4_p.E30K; A0301
KALIGPLGK

SEQ ID NO: 24151 - protein, 10 aa, Homo sapiens
  AACR GENIE Results; ETV4_p.E30K; A1101
KSPGNGSLRK

SEQ ID NO: 24152 - protein, 10 aa, Homo sapiens
  AACR GENIE Results; ETV4_p.E30K; A0301
KALIGPLGKL

SEQ ID NO: 24153 - protein, 9 aa, Homo sapiens
  AACR GENIE Results; ETV4_p.E30K; A1101
KALIGPLGK

SEQ ID NO: 24154 - protein, 9 aa, Homo sapiens
  AACR GENIE Results; EZH2_p.P219S; C0802
SSDKIFEAI

SEQ ID NO: 24155 - protein, 9 aa, Homo sapiens
  AACR GENIE Results; FANCC_p.D23Ifs*23; B5701
PSKTPVFTW

SEQ ID NO: 24156 - protein, 8 aa, Homo sapiens
  AACR GENIE Results; FANCC_p.D23Ifs*23; A2301
VWIRLPLW

SEQ ID NO: 24157 - protein, 10 aa, Homo sapiens
  AACR GENIE Results; FANCC_p.D23Ifs*23; B5701
LSVWIRLPLW

SEQ ID NO: 24158 - protein, 9 aa, Homo sapiens
  AACR GENIE Results; FANCC_p.D23Ifs*23; B5701
SVWIRLPLW

SEQ ID NO: 24159 - protein, 8 aa, Homo sapiens
  AACR GENIE Results; FANCC_p.D23Ifs*23; B0702
KPSKTPVF

SEQ ID NO: 24160 - protein, 10 aa, Homo sapiens
  AACR GENIE Results; FANCC_p.F275L; A3001
LIKDSSLPQA

SEQ ID NO: 24161 - protein, 10 aa, Homo sapiens
  AACR GENIE Results; FANCC_p.M350V; B5101
FPYTSPSLAV

SEQ ID NO: 24162 - protein, 11 aa, Homo sapiens
  AACR GENIE Results; FANCC_p.M350V; B5101
FPYTSPSLAVV

SEQ ID NO: 24163 - protein, 9 aa, Homo sapiens
  AACR GENIE Results; FANCC_p.M350V; B0702
SPSLAVVLL

SEQ ID NO: 24164 - protein, 8 aa, Homo sapiens
  AACR GENIE Results; FANCC_p.M350V; B0702
SPSLAVVL

SEQ ID NO: 24165 - protein, 9 aa, Homo sapiens
  AACR GENIE Results; FANCC_p.M350V; C0102
TSPSLAVVL

SEQ ID NO: 24166 - protein, 10 aa, Homo sapiens
  AACR GENIE Results; FANCC_p.M350V; B3501
FPYTSPSLAV

SEQ ID NO: 24167 - protein, 8 aa, Homo sapiens
  AACR GENIE Results; FANCC_p.Q3H; B3502
MAHDSVDL

SEQ ID NO: 24168 - protein, 8 aa, Homo sapiens
  AACR GENIE Results; FANCD2_p.S441N; B1501
AQNLLHSL

SEQ ID NO: 24169 - protein, 9 aa, Homo sapiens
  AACR GENIE Results; FANCD2_p.S441N; C0303
LAQNLLHSL

SEQ ID NO: 24170 - protein, 9 aa, Homo sapiens
  AACR GENIE Results; FANCD2_p.S441N; C0304
LAQNLLHSL

SEQ ID NO: 24171 - protein, 10 aa, Homo sapiens
  AACR GENIE Results; FANCD2_p.S441N; A0201
SLAQNLLHSL

SEQ ID NO: 24172 - protein, 9 aa, Homo sapiens
  AACR GENIE Results; FANCD2_p.S441N; C1601
LAQNLLHSL

SEQ ID NO: 24173 - protein, 9 aa, Homo sapiens
  AACR GENIE Results; FANCD2_p.S441N; C1203
LAQNLLHSL

SEQ ID NO: 24174 - protein, 9 aa, Homo sapiens
  AACR GENIE Results; FANCD2_p.S441N; A0201
ILSLAQNLL

SEQ ID NO: 24175 - protein, 8 aa, Homo sapiens
  AACR GENIE Results; FANCD2_p.S441N; B0801
AQNLLHSL

SEQ ID NO: 24176 - protein, 9 aa, Homo sapiens
  AACR GENIE Results; FAT1_p.A3261G; B4403
IEGNAEITY

SEQ ID NO: 24177 - protein, 9 aa, Homo sapiens
  AACR GENIE Results; FAT1_p.A3261G; B1801
IEGNAEITY

SEQ ID NO: 24178 - protein, 9 aa, Homo sapiens
  AACR GENIE Results; FAT1_p.A3261G; B1501
IEGNAEITY

SEQ ID NO: 24179 - protein, 9 aa, Homo sapiens
  AACR GENIE Results; FAT1_p.A3261G; B4001
IEGNAEITY

SEQ ID NO: 24180 - protein, 9 aa, Homo sapiens
  AACR GENIE Results; FAT1_p.H3814Y; A0101
VSDPWEEKY

SEQ ID NO: 24181 - protein, 9 aa, Homo sapiens
  AACR GENIE Results; FAT1_p.H3814Y; B5801
VSDPWEEKY

SEQ ID NO: 24182 - protein, 9 aa, Homo sapiens
  AACR GENIE Results; FAT1_p.V2603M; B1801
YEMNIGSSA

SEQ ID NO: 24183 - protein, 9 aa, Homo sapiens
  AACR GENIE Results; FBXW7_p.A503V; C1601
VAVVRCVQY

SEQ ID NO: 24184 - protein, 9 aa, Homo sapiens
  AACR GENIE Results; FBXW7_p.A503V; A0201
VLMGHVAVV

SEQ ID NO: 24185 - protein, 9 aa, Homo sapiens
  AACR GENIE Results; FBXW7_p.A503V; C1203
VAVVRCVQY

SEQ ID NO: 24186 - protein, 8 aa, Homo sapiens
  AACR GENIE Results; FBXW7_p.A503V; A0201
LMGHVAVV

SEQ ID NO: 24187 - protein, 9 aa, Homo sapiens
  AACR GENIE Results; FBXW7_p.A503V; B1302
VLMGHVAVV

SEQ ID NO: 24188 - protein, 9 aa, Homo sapiens
  AACR GENIE Results; FBXW7_p.A503V; B1501
VAVVRCVQY

SEQ ID NO: 24189 - protein, 11 aa, Homo sapiens
  AACR GENIE Results; FBXW7_p.G423V; B5701
RTLVGHTGVVW

SEQ ID NO: 24190 - protein, 10 aa, Homo sapiens
  AACR GENIE Results; FBXW7_p.R465C; B1502
TLYGHTSTVC

SEQ ID NO: 24191 - protein, 9 aa, Homo sapiens
  AACR GENIE Results; FBXW7_p.R465H; B3801
GHTSTVHCM

SEQ ID NO: 24192 - protein, 10 aa, Homo sapiens
  AACR GENIE Results; FBXW7_p.R479Q; B5701
GSQDATLRVW

SEQ ID NO: 24193 - protein, 10 aa, Homo sapiens
  AACR GENIE Results; FBXW7_p.R479Q; B5801
GSQDATLRVW

SEQ ID NO: 24194 - protein, 11 aa, Homo sapiens
  AACR GENIE Results; FBXW7_p.R479Q; A0206
RVVSGSQDATL

SEQ ID NO: 24195 - protein, 11 aa, Homo sapiens
  AACR GENIE Results; FBXW7_p.R479Q; A0205
RVVSGSQDATL

SEQ ID NO: 24196 - protein, 8 aa, Homo sapiens
  AACR GENIE Results; FBXW7_p.R479Q; B1302
SQDATLRV

SEQ ID NO: 24197 - protein, 11 aa, Homo sapiens
  AACR GENIE Results; FBXW7_p.R479Q; A6801
VVSGSQDATLR

SEQ ID NO: 24198 - protein, 11 aa, Homo sapiens
  AACR GENIE Results; FBXW7_p.R479Q; B5801
RVVSGSQDATL

SEQ ID NO: 24199 - protein, 10 aa, Homo sapiens
  AACR GENIE Results; FBXW7_p.R658Q; B4001
GEFIQNLVTL

SEQ ID NO: 24200 - protein, 8 aa, Homo sapiens
  AACR GENIE Results; FBXW7_p.R658Q; B4901
GEFIQNLV

SEQ ID NO: 24201 - protein, 10 aa, Homo sapiens
  AACR GENIE Results; FBXW7_p.R658Q; B4901
GEFIQNLVTL

SEQ ID NO: 24202 - protein, 9 aa, Homo sapiens
  AACR GENIE Results; FBXW7_p.R658Q; A2301
EFIQNLVTL

SEQ ID NO: 24203 - protein, 9 aa, Homo sapiens
  AACR GENIE Results; FBXW7_p.R658Q; A3303
EFIQNLVTL

SEQ ID NO: 24204 - protein, 9 aa, Homo sapiens
  AACR GENIE Results; FBXW7_p.R658Q; C1502
KTGEFIQNL

SEQ ID NO: 24205 - protein, 10 aa, Homo sapiens
  AACR GENIE Results; FBXW7_p.R689W; B2702
GSWNGTEETK

SEQ ID NO: 24206 - protein, 9 aa, Homo sapiens
  AACR GENIE Results; FBXW7_p.S582L; B3801
IHTLTGHQL

SEQ ID NO: 24207 - protein, 8 aa, Homo sapiens
  AACR GENIE Results; FBXW7_p.S582L; B1501
HQLLTSGM

SEQ ID NO: 24208 - protein, 9 aa, Homo sapiens
  AACR GENIE Results; FBXW7_p.S86L; B4403
EENNNRFIL

SEQ ID NO: 24209 - protein, 9 aa, Homo sapiens
  AACR GENIE Results; FGFR1_p.A121S; C0304
FSVNVSDSL

SEQ ID NO: 24210 - protein, 9 aa, Homo sapiens
  AACR GENIE Results; FGFR2_p.R450C; B0801
TPLVRITTC

SEQ ID NO: 24211 - protein, 9 aa, Homo sapiens
  AACR GENIE Results; FGFR2_p.T454M; A0201
SMADTPMLA

SEQ ID NO: 24212 - protein, 11 aa, Homo sapiens
  AACR GENIE Results; FGFR3_p.D462N; B4403
SELELPANPKW

SEQ ID NO: 24213 - protein, 9 aa, Homo sapiens
  AACR GENIE Results; FGFR3_p.D462N; B3503
LPANPKWEL

SEQ ID NO: 24214 - protein, 9 aa, Homo sapiens
  AACR GENIE Results; FGFR3_p.D462N; B0702
LPANPKWEL

SEQ ID NO: 24215 - protein, 11 aa, Homo sapiens
  AACR GENIE Results; FGFR3_p.D462N; B4402
SELELPANPKW

SEQ ID NO: 24216 - protein, 9 aa, Homo sapiens
  AACR GENIE Results; FGFR3_p.D462N; B3501
LPANPKWEL

SEQ ID NO: 24217 - protein, 9 aa, Homo sapiens
  AACR GENIE Results; FGFR3_p.D462N; B4403
LELPANPKW

SEQ ID NO: 24218 - protein, 9 aa, Homo sapiens
  AACR GENIE Results; FGFR3_p.D462N; B3502
LPANPKWEL

SEQ ID NO: 24219 - protein, 9 aa, Homo sapiens
  AACR GENIE Results; FGFR3_p.D462N; B5001
SELELPANP

SEQ ID NO: 24220 - protein, 9 aa, Homo sapiens
  AACR GENIE Results; FH_p.E488K; B4403
KETAIKLGY

SEQ ID NO: 24221 - protein, 9 aa, Homo sapiens
  AACR GENIE Results; FH_p.E488K; B4402
KETAIKLGY

SEQ ID NO: 24222 - protein, 9 aa, Homo sapiens
  AACR GENIE Results; FH_p.E488K; A1101
STLKETAIK

SEQ ID NO: 24223 - protein, 9 aa, Homo sapiens
  AACR GENIE Results; FH_p.E488K; A2301
KETAIKLGY

SEQ ID NO: 24224 - protein, 9 aa, Homo sapiens
  AACR GENIE Results; FH_p.E488K; A2601
ETAIKLGYL

SEQ ID NO: 24225 - protein, 8 aa, Homo sapiens
  AACR GENIE Results; FH_p.E488K; A2601
ETAIKLGY

SEQ ID NO: 24226 - protein, 9 aa, Homo sapiens
  AACR GENIE Results; FH_p.E488K; B0801
TLKETAIKL

SEQ ID NO: 24227 - protein, 9 aa, Homo sapiens
  AACR GENIE Results; FH_p.E488K; A0201
TLKETAIKL

SEQ ID NO: 24228 - protein, 9 aa, Homo sapiens
  AACR GENIE Results; FH_p.E488K; A0301
TLKETAIKL

SEQ ID NO: 24229 - protein, 10 aa, Homo sapiens
  AACR GENIE Results; FH_p.E488K; A1101
STLKETAIKL

SEQ ID NO: 24230 - protein, 10 aa, Homo sapiens
  AACR GENIE Results; FH_p.E488K; A0301
STLKETAIKL

SEQ ID NO: 24231 - protein, 9 aa, Homo sapiens
  AACR GENIE Results; FH_p.E488K; A0301
STLKETAIK

SEQ ID NO: 24232 - protein, 8 aa, Homo sapiens
  AACR GENIE Results; FLT1_p.D270N; B0801
YPNEKNKR

SEQ ID NO: 24233 - protein, 11 aa, Homo sapiens
  AACR GENIE Results; FLT1_p.R224Q; A2402
NYLTHQQTNTI

SEQ ID NO: 24234 - protein, 9 aa, Homo sapiens
  AACR GENIE Results; FLT1_p.R312C; A0301
CVRSGPSFK

SEQ ID NO: 24235 - protein, 8 aa, Homo sapiens
  AACR GENIE Results; FLT1_p.R501K; B5101
DSNMGNKI

SEQ ID NO: 24236 - protein, 9 aa, Homo sapiens
  AACR GENIE Results; FLT1_p.R501K; B3801
ADSNMGNKI

SEQ ID NO: 24237 - protein, 9 aa, Homo sapiens
  AACR GENIE Results; FLT4_p.C206Y; A2402
LYLQYETTW

SEQ ID NO: 24238 - protein, 10 aa, Homo sapiens
  AACR GENIE Results; FLT4_p.E100K; B1501
KVHANDTGSY

SEQ ID NO: 24239 - protein, 9 aa, Homo sapiens
  AACR GENIE Results; FLT4_p.P219H; C0802
DQDFLSNHF

SEQ ID NO: 24240 - protein, 8 aa, Homo sapiens
  AACR GENIE Results; FLT4_p.P219H; B4403
QDFLSNHF

SEQ ID NO: 24241 - protein, 10 aa, Homo sapiens
  AACR GENIE Results; FLT4_p.P363L; B5701
AAYPLPEFQW

SEQ ID NO: 24242 - protein, 9 aa, Homo sapiens
  AACR GENIE Results; FLT4_p.P363L; B3501
YPLPEFQWY

SEQ ID NO: 24243 - protein, 9 aa, Homo sapiens
  AACR GENIE Results; FLT4_p.P363L; C0303
LAAYPLPEF

SEQ ID NO: 24244 - protein, 9 aa, Homo sapiens
  AACR GENIE Results; FLT4_p.P363L; A2402
AYPLPEFQW

SEQ ID NO: 24245 - protein, 9 aa, Homo sapiens
  AACR GENIE Results; FLT4_p.P363L; C0304
LAAYPLPEF

SEQ ID NO: 24246 - protein, 9 aa, Homo sapiens
  AACR GENIE Results; FLT4_p.P363L; C1601
LAAYPLPEF

SEQ ID NO: 24247 - protein, 9 aa, Homo sapiens
  AACR GENIE Results; FLT4_p.P363L; B3501
LAAYPLPEF

SEQ ID NO: 24248 - protein, 9 aa, Homo sapiens
  AACR GENIE Results; FLT4_p.P363L; C0202
LAAYPLPEF

SEQ ID NO: 24249 - protein, 9 aa, Homo sapiens
  AACR GENIE Results; FLT4_p.P363L; A2301
AYPLPEFQW

SEQ ID NO: 24250 - protein, 9 aa, Homo sapiens
  AACR GENIE Results; FLT4_p.P364S; C0304
LAAYPPSEF

SEQ ID NO: 24251 - protein, 8 aa, Homo sapiens
  AACR GENIE Results; FLT4_p.P364S; C1203
AAYPPSEF

SEQ ID NO: 24252 - protein, 9 aa, Homo sapiens
  AACR GENIE Results; FLT4_p.P364S; C1203
LAAYPPSEF

SEQ ID NO: 24253 - protein, 9 aa, Homo sapiens
  AACR GENIE Results; FLT4_p.P364S; A2402
AYPPSEFQW

SEQ ID NO: 24254 - protein, 8 aa, Homo sapiens
  AACR GENIE Results; FLT4_p.P364S; C0304
AAYPPSEF

SEQ ID NO: 24255 - protein, 9 aa, Homo sapiens
  AACR GENIE Results; FLT4_p.P364S; B3501
YPPSEFQWY

SEQ ID NO: 24256 - protein, 10 aa, Homo sapiens
  AACR GENIE Results; FLT4_p.R1242T; A0201
VSFPGCLATG

SEQ ID NO: 24257 - protein, 8 aa, Homo sapiens
  AACR GENIE Results; GATA3_p.A109D; C0501
HTDSPWNL

SEQ ID NO: 24258 - protein, 8 aa, Homo sapiens
  AACR GENIE Results; GATA4_p.H436Q; B1501
SQGDIITA

SEQ ID NO: 24259 - protein, 8 aa, Homo sapiens
  AACR GENIE Results; GATA4_p.H436Q; A0201
SQGDIITA

SEQ ID NO: 24260 - protein, 9 aa, Homo sapiens
  AACR GENIE Results; GATA4_p.H436Q; B3501
DSQGDIITA

SEQ ID NO: 24261 - protein, 8 aa, Homo sapiens
  AACR GENIE Results; GLI1_p.A918T; B3501
TPAQEPSY

SEQ ID NO: 24262 - protein, 9 aa, Homo sapiens
  AACR GENIE Results; GLI1_p.D400Mfs*30; B0702
SPRGSGKEV

SEQ ID NO: 24263 - protein, 9 aa, Homo sapiens
  AACR GENIE Results; GLI1_p.R380Q; A0101
YTDPSSLQK

SEQ ID NO: 24264 - protein, 10 aa, Homo sapiens
  AACR GENIE Results; GLI1_p.R380Q; A0101
YTDPSSLQKH

SEQ ID NO: 24265 - protein, 9 aa, Homo sapiens
  AACR GENIE Results; GLI1_p.R380Q; A1101
YTDPSSLQK

SEQ ID NO: 24266 - protein, 9 aa, Homo sapiens
  AACR GENIE Results; GLI1_p.R380Q; B5101
DPSSLQKHV

SEQ ID NO: 24267 - protein, 9 aa, Homo sapiens
  AACR GENIE Results; GLI1_p.R380Q; A0301
YTDPSSLQK

SEQ ID NO: 24268 - protein, 11 aa, Homo sapiens
  AACR GENIE Results; GLI1_p.R380Q; B2705
KRYTDPSSLQK

SEQ ID NO: 24269 - protein, 9 aa, Homo sapiens
  AACR GENIE Results; GLI1_p.R380Q; A0201
SLQKHVKTV

SEQ ID NO: 24270 - protein, 9 aa, Homo sapiens
  AACR GENIE Results; GLI3_p.A353T; A2402
TYSSTPVSL

SEQ ID NO: 24271 - protein, 8 aa, Homo sapiens
  AACR GENIE Results; GLI3_p.A353T; C0304
YSSTPVSL

SEQ ID NO: 24272 - protein, 8 aa, Homo sapiens
  AACR GENIE Results; GLI3_p.A353T; C0303
YSSTPVSL

SEQ ID NO: 24273 - protein, 10 aa, Homo sapiens
  AACR GENIE Results; GLI3_p.A353T; C0304
FTYSSTPVSL

SEQ ID NO: 24274 - protein, 10 aa, Homo sapiens
  AACR GENIE Results; GLI3_p.A353T; C0303
FTYSSTPVSL

SEQ ID NO: 24275 - protein, 8 aa, Homo sapiens
  AACR GENIE Results; GLI3_p.A353T; C1601
YSSTPVSL

SEQ ID NO: 24276 - protein, 11 aa, Homo sapiens
  AACR GENIE Results; GLI3_p.A353T; A2402
TYSSTPVSLHM

SEQ ID NO: 24277 - protein, 8 aa, Homo sapiens
  AACR GENIE Results; GLI3_p.A353T; C1203
YSSTPVSL

SEQ ID NO: 24278 - protein, 9 aa, Homo sapiens
  AACR GENIE Results; GLI3_p.A353T; C0702
TYSSTPVSL

SEQ ID NO: 24279 - protein, 9 aa, Homo sapiens
  AACR GENIE Results; GLI3_p.A353T; C1601
SSTPVSLHM

SEQ ID NO: 24280 - protein, 11 aa, Homo sapiens
  AACR GENIE Results; GLI3_p.M274V; A2402
EYLHAVDSTRF

SEQ ID NO: 24281 - protein, 8 aa, Homo sapiens
  AACR GENIE Results; GNAS_p.Q227L; C0401
MFDVGGLR

SEQ ID NO: 24282 - protein, 9 aa, Homo sapiens
  AACR GENIE Results; GNAS_p.Q227L; B3801
FHMFDVGGL

SEQ ID NO: 24283 - protein, 11 aa, Homo sapiens
  AACR GENIE Results; GNAS_p.R201C; A1101
CVLTSGIFETK

SEQ ID NO: 24284 - protein, 11 aa, Homo sapiens
  AACR GENIE Results; GNAS_p.R201C; A0301
CVLTSGIFETK

SEQ ID NO: 24285 - protein, 11 aa, Homo sapiens
  AACR GENIE Results; GNAS_p.R201C; B2702
CVLTSGIFETK

SEQ ID NO: 24286 - protein, 11 aa, Homo sapiens
  AACR GENIE Results; GNAS_p.R201H; B2702
HVLTSGIFETK

SEQ ID NO: 24287 - protein, 11 aa, Homo sapiens
  AACR GENIE Results; GNAS_p.R201H; A0301
HVLTSGIFETK

SEQ ID NO: 24288 - protein, 11 aa, Homo sapiens
  AACR GENIE Results; GNAS_p.R201H; A1101
HVLTSGIFETK

SEQ ID NO: 24289 - protein, 9 aa, Homo sapiens
  AACR GENIE Results; GNAS_p.R201H; B3701
QDLLRCHVL

SEQ ID NO: 24290 - protein, 11 aa, Homo sapiens
  AACR GENIE Results; GNAS_p.R201H; A6802
HVLTSGIFETK

SEQ ID NO: 24291 - protein, 8 aa, Homo sapiens
  AACR GENIE Results; GNAS_p.R201H; B1502
HVLTSGIF

SEQ ID NO: 24292 - protein, 11 aa, Homo sapiens
  AACR GENIE Results; GNAS_p.R201L; A0301
LVLTSGIFETK

SEQ ID NO: 24293 - protein, 11 aa, Homo sapiens
  AACR GENIE Results; GNAS_p.R201L; A1101
LVLTSGIFETK

SEQ ID NO: 24294 - protein, 9 aa, Homo sapiens
  AACR GENIE Results; H3F3A_p.R50H; B5701
VALHEIRRY

SEQ ID NO: 24295 - protein, 9 aa, Homo sapiens
  AACR GENIE Results; H3F3A_p.R50H; A6801
GTVALHEIR

SEQ ID NO: 24296 - protein, 9 aa, Homo sapiens
  AACR GENIE Results; H3F3A_p.R50H; A6801
TVALHEIRR

SEQ ID NO: 24297 - protein, 9 aa, Homo sapiens
  AACR GENIE Results; H3F3A_p.R50H; C1601
VALHEIRRY

SEQ ID NO: 24298 - protein, 9 aa, Homo sapiens
  AACR GENIE Results; H3F3A_p.R50H; B5701
GTVALHEIR

SEQ ID NO: 24299 - protein, 8 aa, Homo sapiens
  AACR GENIE Results; H3F3A_p.R50H; A0201
GTVALHEI

SEQ ID NO: 24300 - protein, 11 aa, Homo sapiens
  AACR GENIE Results; H3F3A_p.R50H; C0602
YRPGTVALHEI

SEQ ID NO: 24301 - protein, 9 aa, Homo sapiens
  AACR GENIE Results; H3F3A_p.R50H; C1203
VALHEIRRY

SEQ ID NO: 24302 - protein, 10 aa, Homo sapiens
  AACR GENIE Results; H3F3A_p.R50H; A6801
GTVALHEIRR

SEQ ID NO: 24303 - protein, 11 aa, Homo sapiens
  AACR GENIE Results; H3F3A_p.R50H; B5701
GTVALHEIRRY

SEQ ID NO: 24304 - protein, 10 aa, Homo sapiens
  AACR GENIE Results; H3F3A_p.R50H; B0702
RPGTVALHEI

SEQ ID NO: 24305 - protein, 8 aa, Homo sapiens
  AACR GENIE Results; H3F3A_p.R50H; A0301
ALHEIRRY

SEQ ID NO: 24306 - protein, 8 aa, Homo sapiens
  AACR GENIE Results; H3F3A_p.R50H; B5701
GTVALHEI

SEQ ID NO: 24307 - protein, 9 aa, Homo sapiens
  AACR GENIE Results; H3F3A_p.R50H; A1101
GTVALHEIR

SEQ ID NO: 24308 - protein, 8 aa, Homo sapiens
  AACR GENIE Results; H3F3A_p.R50H; A1101
RPGTVALH

SEQ ID NO: 24309 - protein, 10 aa, Homo sapiens
  AACR GENIE Results; HGF_p.T316N; B5101
EGYRGNVNTI

SEQ ID NO: 24310 - protein, 9 aa, Homo sapiens
  AACR GENIE Results; HIST1H3B_p.E106Q; C0802
FQDTNLCAI

SEQ ID NO: 24311 - protein, 9 aa, Homo sapiens
  AACR GENIE Results; HIST1H3B_p.E106Q; A0201
FQDTNLCAI

SEQ ID NO: 24312 - protein, 9 aa, Homo sapiens
  AACR GENIE Results; HIST1H3B_p.E106Q; C0501
FQDTNLCAI

SEQ ID NO: 24313 - protein, 11 aa, Homo sapiens
  AACR GENIE Results; HIST1H3B_p.E106Q; A0201
GLFQDTNLCAI

SEQ ID NO: 24314 - protein, 9 aa, Homo sapiens
  AACR GENIE Results; HIST1H3B_p.E106Q; B4001
FQDTNLCAI

SEQ ID NO: 24315 - protein, 10 aa, Homo sapiens
  AACR GENIE Results; HIST1H3B_p.E106Q; A3101
AYLVGLFQDT

SEQ ID NO: 24316 - protein, 9 aa, Homo sapiens
  AACR GENIE Results; HIST1H3B_p.E106Q; A0201
GLFQDTNLC

SEQ ID NO: 24317 - protein, 9 aa, Homo sapiens
  AACR GENIE Results; HIST1H3B_p.E106Q; A0201
YLVGLFQDT

SEQ ID NO: 24318 - protein, 10 aa, Homo sapiens
  AACR GENIE Results; HRAS_p.G13V; A1101
VVVGAGVVGK

SEQ ID NO: 24319 - protein, 9 aa, Homo sapiens
  AACR GENIE Results; HRAS_p.G13V; A1101
VVGAGVVGK

SEQ ID NO: 24320 - protein, 10 aa, Homo sapiens
  AACR GENIE Results; HRAS_p.G13V; A0301
VVVGAGVVGK

SEQ ID NO: 24321 - protein, 9 aa, Homo sapiens
  AACR GENIE Results; HRAS_p.G13V; A0301
VVGAGVVGK

SEQ ID NO: 24322 - protein, 11 aa, Homo sapiens
  AACR GENIE Results; HRAS_p.G13V; A1101
LVVVGAGVVGK

SEQ ID NO: 24323 - protein, 9 aa, Homo sapiens
  AACR GENIE Results; HRAS_p.G13V; B0801
AGVVGKSAL

SEQ ID NO: 24324 - protein, 9 aa, Homo sapiens
  AACR GENIE Results; HRAS_p.G13V; B0702
AGVVGKSAL

SEQ ID NO: 24325 - protein, 9 aa, Homo sapiens
  AACR GENIE Results; HRAS_p.G13V; A0201
KLVVVGAGV

SEQ ID NO: 24326 - protein, 11 aa, Homo sapiens
  AACR GENIE Results; HRAS_p.G13V; A0301
LVVVGAGVVGK

SEQ ID NO: 24327 - protein, 11 aa, Homo sapiens
  AACR GENIE Results; HRAS_p.G13V; B0801
VGAGVVGKSAL

SEQ ID NO: 24328 - protein, 8 aa, Homo sapiens
  AACR GENIE Results; HRAS_p.G13V; A1101
VGAGVVGK

SEQ ID NO: 24329 - protein, 9 aa, Homo sapiens
  AACR GENIE Results; HRAS_p.G13V; B1501
AGVVGKSAL

SEQ ID NO: 24330 - protein, 8 aa, Homo sapiens
  AACR GENIE Results; HRAS_p.G13V; B0801
GVVGKSAL

SEQ ID NO: 24331 - protein, 10 aa, Homo sapiens
  AACR GENIE Results; ID3_p.E12K; A0301
ALSPVRGCYK

SEQ ID NO: 24332 - protein, 10 aa, Homo sapiens
  AACR GENIE Results; ID3_p.E12K; A1101
ALSPVRGCYK

SEQ ID NO: 24333 - protein, 9 aa, Homo sapiens
  AACR GENIE Results; IDH1_p.R132L; B1501
GLHAYGDQY

SEQ ID NO: 24334 - protein, 9 aa, Homo sapiens
  AACR GENIE Results; IDH1_p.R132L; A2902
GLHAYGDQY

SEQ ID NO: 24335 - protein, 10 aa, Homo sapiens
  AACR GENIE Results; IDH2_p.R140Q; B1501
IQNILGGTVF

SEQ ID NO: 24336 - protein, 10 aa, Homo sapiens
  AACR GENIE Results; IDH2_p.R140Q; B0702
SPNGTIQNIL

SEQ ID NO: 24337 - protein, 10 aa, Homo sapiens
  AACR GENIE Results; IGF1R_p.N202S; A6801
TTINNEYSYR

SEQ ID NO: 24338 - protein, 9 aa, Homo sapiens
  AACR GENIE Results; IGF1R_p.N202S; A3002
TTINNEYSY

SEQ ID NO: 24339 - protein, 9 aa, Homo sapiens
  AACR GENIE Results; IGF1R_p.N202S; A2902
TTINNEYSY

SEQ ID NO: 24340 - protein, 10 aa, Homo sapiens
  AACR GENIE Results; IGF1R_p.N202S; A3303
TTINNEYSYR

SEQ ID NO: 24341 - protein, 9 aa, Homo sapiens
  AACR GENIE Results; IGF1R_p.N202S; B1501
TTINNEYSY

SEQ ID NO: 24342 - protein, 10 aa, Homo sapiens
  AACR GENIE Results; IGF1R_p.N202S; B5801
KTTINNEYSY

SEQ ID NO: 24343 - protein, 9 aa, Homo sapiens
  AACR GENIE Results; IGF1R_p.N202S; B5801
TTINNEYSY

SEQ ID NO: 24344 - protein, 10 aa, Homo sapiens
  AACR GENIE Results; IGF1R_p.N202S; A3002
KTTINNEYSY

SEQ ID NO: 24345 - protein, 9 aa, Homo sapiens
  AACR GENIE Results; IGF1R_p.N202S; B3501
TTINNEYSY

SEQ ID NO: 24346 - protein, 8 aa, Homo sapiens
  AACR GENIE Results; IGF1R_p.N202S; A3303
INNEYSYR

SEQ ID NO: 24347 - protein, 9 aa, Homo sapiens
  AACR GENIE Results; IGF1R_p.N202S; A2601
TTINNEYSY

SEQ ID NO: 24348 - protein, 10 aa, Homo sapiens
  AACR GENIE Results; IGF1R_p.N202S; A6802
TTINNEYSYR

SEQ ID NO: 24349 - protein, 9 aa, Homo sapiens
  AACR GENIE Results; IGF1R_p.N202S; A3303
TINNEYSYR

SEQ ID NO: 24350 - protein, 9 aa, Homo sapiens
  AACR GENIE Results; IGF1R_p.T1366P; B3503
LPLPQSSPC

SEQ ID NO: 24351 - protein, 10 aa, Homo sapiens
  AACR GENIE Results; IKZF1_p.A369T; B3801
AQDSTVENLL

SEQ ID NO: 24352 - protein, 9 aa, Homo sapiens
  AACR GENIE Results; IKZF1_p.A369T; B3801
AQDSTVENL

SEQ ID NO: 24353 - protein, 11 aa, Homo sapiens
  AACR GENIE Results; IKZF1_p.A369T; A1101
STVENLLLLSK

SEQ ID NO: 24354 - protein, 9 aa, Homo sapiens
  AACR GENIE Results; IKZF1_p.A369T; C0802
AQDSTVENL

SEQ ID NO: 24355 - protein, 9 aa, Homo sapiens
  AACR GENIE Results; IKZF1_p.A369T; B3901
NHSAQDSTV

SEQ ID NO: 24356 - protein, 8 aa, Homo sapiens
  AACR GENIE Results; IKZF1_p.A369T; B3701
QDSTVENL

SEQ ID NO: 24357 - protein, 9 aa, Homo sapiens
  AACR GENIE Results; IKZF1_p.A369T; B3801
NHSAQDSTV

SEQ ID NO: 24358 - protein, 10 aa, Homo sapiens
  AACR GENIE Results; IKZF1_p.A369T; B2702
TVENLLLLSK

SEQ ID NO: 24359 - protein, 11 aa, Homo sapiens
  AACR GENIE Results; IKZF1_p.A369T; B3801
AQDSTVENLLL

SEQ ID NO: 24360 - protein, 11 aa, Homo sapiens
  AACR GENIE Results; IKZF1_p.A369T; B1302
AQDSTVENLLL

SEQ ID NO: 24361 - protein, 9 aa, Homo sapiens
  AACR GENIE Results; IKZF1_p.A369T; C0501
AQDSTVENL

SEQ ID NO: 24362 - protein, 9 aa, Homo sapiens
  AACR GENIE Results; IKZF1_p.A369T; B3801
QDSTVENLL

SEQ ID NO: 24363 - protein, 9 aa, Homo sapiens
  AACR GENIE Results; IKZF1_p.A369T; A0205
AQDSTVENL

SEQ ID NO: 24364 - protein, 9 aa, Homo sapiens
  AACR GENIE Results; IKZF1_p.A369T; B3901
AQDSTVENL

SEQ ID NO: 24365 - protein, 9 aa, Homo sapiens
  AACR GENIE Results; IKZF1_p.A369T; C1502
STVENLLLL

SEQ ID NO: 24366 - protein, 9 aa, Homo sapiens
  AACR GENIE Results; IKZF1_p.A369T; B1302
AQDSTVENL

SEQ ID NO: 24367 - protein, 9 aa, Homo sapiens
  AACR GENIE Results; IKZF1_p.A369T; A6802
STVENLLLL

SEQ ID NO: 24368 - protein, 10 aa, Homo sapiens
  AACR GENIE Results; IKZF1_p.A369T; A1101
TVENLLLLSK

SEQ ID NO: 24369 - protein, 9 aa, Homo sapiens
  AACR GENIE Results; IKZF1_p.A369T; A0205
STVENLLLL

SEQ ID NO: 24370 - protein, 11 aa, Homo sapiens
  AACR GENIE Results; IKZF1_p.A369T; A6801
STVENLLLLSK

SEQ ID NO: 24371 - protein, 11 aa, Homo sapiens
  AACR GENIE Results; IKZF1_p.A369T; B2702
STVENLLLLSK

SEQ ID NO: 24372 - protein, 10 aa, Homo sapiens
  AACR GENIE Results; IKZF1_p.A369T; C0802
AQDSTVENLL

SEQ ID NO: 24373 - protein, 9 aa, Homo sapiens
  AACR GENIE Results; IKZF1_p.A369T; B4002
QDSTVENLL

SEQ ID NO: 24374 - protein, 11 aa, Homo sapiens
  AACR GENIE Results; IKZF1_p.V370M; A1101
SAMENLLLLSK

SEQ ID NO: 24375 - protein, 9 aa, Homo sapiens
  AACR GENIE Results; IKZF1_p.V370M; C0802
AQDSAMENL

SEQ ID NO: 24376 - protein, 9 aa, Homo sapiens
  AACR GENIE Results; IKZF1_p.V370M; B3801
NHSAQDSAM

SEQ ID NO: 24377 - protein, 10 aa, Homo sapiens
  AACR GENIE Results; IKZF1_p.V370M; B3801
AQDSAMENLL

SEQ ID NO: 24378 - protein, 9 aa, Homo sapiens
  AACR GENIE Results; IKZF1_p.V370M; B3801
AQDSAMENL

SEQ ID NO: 24379 - protein, 9 aa, Homo sapiens
  AACR GENIE Results; IKZF1_p.V370M; C0304
SAMENLLLL

SEQ ID NO: 24380 - protein, 9 aa, Homo sapiens
  AACR GENIE Results; IKZF1_p.V370M; C1502
SAMENLLLL

SEQ ID NO: 24381 - protein, 9 aa, Homo sapiens
  AACR GENIE Results; IKZF1_p.V370M; C0303
SAMENLLLL

SEQ ID NO: 24382 - protein, 9 aa, Homo sapiens
  AACR GENIE Results; IKZF1_p.V370M; A1101
SAMENLLLL

SEQ ID NO: 24383 - protein, 9 aa, Homo sapiens
  AACR GENIE Results; IKZF1_p.V370M; B3801
QDSAMENLL

SEQ ID NO: 24384 - protein, 9 aa, Homo sapiens
  AACR GENIE Results; IKZF1_p.V370M; C0501
AQDSAMENL

SEQ ID NO: 24385 - protein, 10 aa, Homo sapiens
  AACR GENIE Results; IKZF1_p.V370M; C0802
AQDSAMENLL

SEQ ID NO: 24386 - protein, 9 aa, Homo sapiens
  AACR GENIE Results; JAK2_p.R1063C; B3501
SPPAEFMCM

SEQ ID NO: 24387 - protein, 9 aa, Homo sapiens
  AACR GENIE Results; JAK3_p.L368V; B4001
KEVAPPRVL

SEQ ID NO: 24388 - protein, 9 aa, Homo sapiens
  AACR GENIE Results; JAK3_p.L368V; B4403
KEVAPPRVL

SEQ ID NO: 24389 - protein, 9 aa, Homo sapiens
  AACR GENIE Results; JAK3_p.L368V; B0702
KEVAPPRVL

SEQ ID NO: 24390 - protein, 9 aa, Homo sapiens
  AACR GENIE Results; JAK3_p.L368V; B4402
KEVAPPRVL

SEQ ID NO: 24391 - protein, 8 aa, Homo sapiens
  AACR GENIE Results; JAK3_p.L454P; B4403
RELPATCW

SEQ ID NO: 24392 - protein, 11 aa, Homo sapiens
  AACR GENIE Results; JAK3_p.L454P; B5701
SSLRELPATCW

SEQ ID NO: 24393 - protein, 9 aa, Homo sapiens
  AACR GENIE Results; JAK3_p.L454P; A3001
SLRELPATC

SEQ ID NO: 24394 - protein, 9 aa, Homo sapiens
  AACR GENIE Results; JAK3_p.L454P; A0201
SLRELPATC

SEQ ID NO: 24395 - protein, 8 aa, Homo sapiens
  AACR GENIE Results; JAK3_p.L454P; A2301
RELPATCW

SEQ ID NO: 24396 - protein, 8 aa, Homo sapiens
  AACR GENIE Results; JAK3_p.L454P; B4402
RELPATCW

SEQ ID NO: 24397 - protein, 9 aa, Homo sapiens
  AACR GENIE Results; KDM6A_p.S820A; B5101
VASSPASAI

SEQ ID NO: 24398 - protein, 9 aa, Homo sapiens
  AACR GENIE Results; KDR_p.A10T; B5701
KVLLAVTLW

SEQ ID NO: 24399 - protein, 9 aa, Homo sapiens
  AACR GENIE Results; KDR_p.E980G; A1101
ASSGFVEGK

SEQ ID NO: 24400 - protein, 11 aa, Homo sapiens
  AACR GENIE Results; KDR_p.E980G; A1101
SSASSGFVEGK

SEQ ID NO: 24401 - protein, 10 aa, Homo sapiens
  AACR GENIE Results; KDR_p.E980G; A1101
SASSGFVEGK

SEQ ID NO: 24402 - protein, 9 aa, Homo sapiens
  AACR GENIE Results; KDR_p.E980G; A0301
ASSGFVEGK

SEQ ID NO: 24403 - protein, 9 aa, Homo sapiens
  AACR GENIE Results; KDR_p.I256T; B4403
TELNVGTDF

SEQ ID NO: 24404 - protein, 9 aa, Homo sapiens
  AACR GENIE Results; KDR_p.I256T; B1801
TELNVGTDF

SEQ ID NO: 24405 - protein, 11 aa, Homo sapiens
  AACR GENIE Results; KDR_p.I256T; B4403
TELNVGTDFNW

SEQ ID NO: 24406 - protein, 9 aa, Homo sapiens
  AACR GENIE Results; KDR_p.I256T; B4001
TELNVGTDF

SEQ ID NO: 24407 - protein, 9 aa, Homo sapiens
  AACR GENIE Results; KDR_p.I256T; B4402
TELNVGTDF

SEQ ID NO: 24408 - protein, 9 aa, Homo sapiens
  AACR GENIE Results; KDR_p.I256T; B1501
TELNVGTDF

SEQ ID NO: 24409 - protein, 8 aa, Homo sapiens
  AACR GENIE Results; KDR_p.I256T; A0101
GTDFNWEY

SEQ ID NO: 24410 - protein, 11 aa, Homo sapiens
  AACR GENIE Results; KDR_p.I256T; B4402
TELNVGTDFNW

SEQ ID NO: 24411 - protein, 9 aa, Homo sapiens
  AACR GENIE Results; KDR_p.R347H; B4901
VEATVGEHV

SEQ ID NO: 24412 - protein, 9 aa, Homo sapiens
  AACR GENIE Results; KDR_p.R347H; B4001
VEATVGEHV

SEQ ID NO: 24413 - protein, 9 aa, Homo sapiens
  AACR GENIE Results; KDR_p.R347H; B1302
VEATVGEHV

SEQ ID NO: 24414 - protein, 9 aa, Homo sapiens
  AACR GENIE Results; KDR_p.R347H; A3001
VEATVGEHV

SEQ ID NO: 24415 - protein, 9 aa, Homo sapiens
  AACR GENIE Results; KDR_p.R347H; B4403
VEATVGEHV

SEQ ID NO: 24416 - protein, 9 aa, Homo sapiens
  AACR GENIE Results; KDR_p.R347H; A6801
EATVGEHVR

SEQ ID NO: 24417 - protein, 11 aa, Homo sapiens
  AACR GENIE Results; KDR_p.R347H; A0201
SLVEATVGEHV

SEQ ID NO: 24418 - protein, 11 aa, Homo sapiens
  AACR GENIE Results; KDR_p.R347H; B1302
SLVEATVGEHV

SEQ ID NO: 24419 - protein, 8 aa, Homo sapiens
  AACR GENIE Results; KDR_p.R347H; B1801
VEATVGEH

SEQ ID NO: 24420 - protein, 9 aa, Homo sapiens
  AACR GENIE Results; KDR_p.R549K; A1101
RVISFHVTK

SEQ ID NO: 24421 - protein, 9 aa, Homo sapiens
  AACR GENIE Results; KDR_p.R549K; A0301
RVISFHVTK

SEQ ID NO: 24422 - protein, 9 aa, Homo sapiens
  AACR GENIE Results; KDR_p.R549K; C0304
VTKGPEITL

SEQ ID NO: 24423 - protein, 9 aa, Homo sapiens
  AACR GENIE Results; KDR_p.R549K; C1203
VTKGPEITL

SEQ ID NO: 24424 - protein, 9 aa, Homo sapiens
  AACR GENIE Results; KDR_p.R549K; B1501
VTKGPEITL

SEQ ID NO: 24425 - protein, 9 aa, Homo sapiens
  AACR GENIE Results; KDR_p.R549K; C0202
VTKGPEITL

SEQ ID NO: 24426 - protein, 9 aa, Homo sapiens
  AACR GENIE Results; KDR_p.R549K; C0303
VTKGPEITL

SEQ ID NO: 24427 - protein, 9 aa, Homo sapiens
  AACR GENIE Results; KDR_p.R961W; B5701
GAIPVDLKW

SEQ ID NO: 24428 - protein, 10 aa, Homo sapiens
  AACR GENIE Results; KDR_p.R961W; B5701
VGAIPVDLKW

SEQ ID NO: 24429 - protein, 9 aa, Homo sapiens
  AACR GENIE Results; KDR_p.T1258M; B1501
NQMDSGMVL

SEQ ID NO: 24430 - protein, 9 aa, Homo sapiens
  AACR GENIE Results; KDR_p.T1258M; B1501
KVIPDDNQM

SEQ ID NO: 24431 - protein, 9 aa, Homo sapiens
  AACR GENIE Results; KDR_p.T875A; C0304
AAHSEHRAL

SEQ ID NO: 24432 - protein, 9 aa, Homo sapiens
  AACR GENIE Results; KDR_p.T875A; C1601
AAHSEHRAL

SEQ ID NO: 24433 - protein, 8 aa, Homo sapiens
  AACR GENIE Results; KDR_p.V218I; B1501
YIVVIVGY

SEQ ID NO: 24434 - protein, 10 aa, Homo sapiens
  AACR GENIE Results; KEAP1_p.C171F; B1501
YQIDSVVRAF

SEQ ID NO: 24435 - protein, 9 aa, Homo sapiens
  AACR GENIE Results; KEAP1_p.C171F; C0802
FSDFLVQQL

SEQ ID NO: 24436 - protein, 9 aa, Homo sapiens
  AACR GENIE Results; KEAP1_p.C171F; C0501
FSDFLVQQL

SEQ ID NO: 24437 - protein, 9 aa, Homo sapiens
  AACR GENIE Results; KEAP1_p.C171F; B3501
QIDSVVRAF

SEQ ID NO: 24438 - protein, 10 aa, Homo sapiens
  AACR GENIE Results; KEAP1_p.C171F; A2601
YQIDSVVRAF

SEQ ID NO: 24439 - protein, 9 aa, Homo sapiens
  AACR GENIE Results; KEAP1_p.C171F; C0802
QIDSVVRAF

SEQ ID NO: 24440 - protein, 9 aa, Homo sapiens
  AACR GENIE Results; KEAP1_p.C171F; B1501
QIDSVVRAF

SEQ ID NO: 24441 - protein, 9 aa, Homo sapiens
  AACR GENIE Results; KEAP1_p.C171F; A0101
QIDSVVRAF

SEQ ID NO: 24442 - protein, 9 aa, Homo sapiens
  AACR GENIE Results; KEAP1_p.C171F; B3801
QIDSVVRAF

SEQ ID NO: 24443 - protein, 11 aa, Homo sapiens
  AACR GENIE Results; KEAP1_p.C171F; A2402
MYQIDSVVRAF

SEQ ID NO: 24444 - protein, 9 aa, Homo sapiens
  AACR GENIE Results; KEAP1_p.C171F; B4403
QIDSVVRAF

SEQ ID NO: 24445 - protein, 9 aa, Homo sapiens
  AACR GENIE Results; KEAP1_p.C171F; C0501
QIDSVVRAF

SEQ ID NO: 24446 - protein, 10 aa, Homo sapiens
  AACR GENIE Results; KEAP1_p.C171F; C0202
YQIDSVVRAF

SEQ ID NO: 24447 - protein, 9 aa, Homo sapiens
  AACR GENIE Results; KEAP1_p.C171F; B4402
QIDSVVRAF

SEQ ID NO: 24448 - protein, 9 aa, Homo sapiens
  AACR GENIE Results; KEAP1_p.C171F; B5701
QIDSVVRAF

SEQ ID NO: 24449 - protein, 8 aa, Homo sapiens
  AACR GENIE Results; KEAP1_p.C171F; B1801
IDSVVRAF

SEQ ID NO: 24450 - protein, 10 aa, Homo sapiens
  AACR GENIE Results; KEAP1_p.C171F; A2301
YQIDSVVRAF

SEQ ID NO: 24451 - protein, 9 aa, Homo sapiens
  AACR GENIE Results; KEAP1_p.C171F; B0702
QIDSVVRAF

SEQ ID NO: 24452 - protein, 9 aa, Homo sapiens
  AACR GENIE Results; KEAP1_p.C171F; C0401
QIDSVVRAF

SEQ ID NO: 24453 - protein, 9 aa, Homo sapiens
  AACR GENIE Results; KEAP1_p.C171F; A0101
FSDFLVQQL

SEQ ID NO: 24454 - protein, 9 aa, Homo sapiens
  AACR GENIE Results; KEAP1_p.C171F; A0301
QIDSVVRAF

SEQ ID NO: 24455 - protein, 11 aa, Homo sapiens
  AACR GENIE Results; KEAP1_p.C171F; A2301
MYQIDSVVRAF

SEQ ID NO: 24456 - protein, 10 aa, Homo sapiens
  AACR GENIE Results; KEAP1_p.C171F; B1302
YQIDSVVRAF

SEQ ID NO: 24457 - protein, 9 aa, Homo sapiens
  AACR GENIE Results; KEAP1_p.C171F; C0304
FSDFLVQQL

SEQ ID NO: 24458 - protein, 10 aa, Homo sapiens
  AACR GENIE Results; KEAP1_p.C171F; B3801
YQIDSVVRAF

SEQ ID NO: 24459 - protein, 10 aa, Homo sapiens
  AACR GENIE Results; KEAP1_p.C171F; B4403
YQIDSVVRAF

SEQ ID NO: 24460 - protein, 10 aa, Homo sapiens
  AACR GENIE Results; KEAP1_p.C171F; A3201
YQIDSVVRAF

SEQ ID NO: 24461 - protein, 9 aa, Homo sapiens
  AACR GENIE Results; KEAP1_p.C171F; B3801
FSDFLVQQL

SEQ ID NO: 24462 - protein, 9 aa, Homo sapiens
  AACR GENIE Results; KEAP1_p.C171F; C1502
FSDFLVQQL

SEQ ID NO: 24463 - protein, 9 aa, Homo sapiens
  AACR GENIE Results; KEAP1_p.C171F; C0401
FSDFLVQQL

SEQ ID NO: 24464 - protein, 10 aa, Homo sapiens
  AACR GENIE Results; KEAP1_p.C171F; B4402
YQIDSVVRAF

SEQ ID NO: 24465 - protein, 10 aa, Homo sapiens
  AACR GENIE Results; KEAP1_p.C171F; C0303
YQIDSVVRAF

SEQ ID NO: 24466 - protein, 9 aa, Homo sapiens
  AACR GENIE Results; KEAP1_p.C171F; A1101
QIDSVVRAF

SEQ ID NO: 24467 - protein, 10 aa, Homo sapiens
  AACR GENIE Results; KEAP1_p.C171F; B5701
YQIDSVVRAF

SEQ ID NO: 24468 - protein, 9 aa, Homo sapiens
  AACR GENIE Results; KEAP1_p.C171F; B4001
FSDFLVQQL

SEQ ID NO: 24469 - protein, 10 aa, Homo sapiens
  AACR GENIE Results; KEAP1_p.C171F; C0304
YQIDSVVRAF

SEQ ID NO: 24470 - protein, 9 aa, Homo sapiens
  AACR GENIE Results; KEAP1_p.C171F; A3201
QIDSVVRAF

SEQ ID NO: 24471 - protein, 10 aa, Homo sapiens
  AACR GENIE Results; KEAP1_p.C171F; B3501
YQIDSVVRAF

SEQ ID NO: 24472 - protein, 10 aa, Homo sapiens
  AACR GENIE Results; KEAP1_p.C297F; B4403
CEILQSDSRF

SEQ ID NO: 24473 - protein, 9 aa, Homo sapiens
  AACR GENIE Results; KEAP1_p.C297F; A0101
QSDSRFKDY

SEQ ID NO: 24474 - protein, 9 aa, Homo sapiens
  AACR GENIE Results; KEAP1_p.C297F; A2601
EILQSDSRF

SEQ ID NO: 24475 - protein, 9 aa, Homo sapiens
  AACR GENIE Results; KEAP1_p.C297F; A0301
ILQSDSRFK

SEQ ID NO: 24476 - protein, 9 aa, Homo sapiens
  AACR GENIE Results; KEAP1_p.D236Y; C1601
LVTLISRDY

SEQ ID NO: 24477 - protein, 10 aa, Homo sapiens
  AACR GENIE Results; KEAP1_p.D479Y; A1101
AVGGFYGTNR

SEQ ID NO: 24478 - protein, 9 aa, Homo sapiens
  AACR GENIE Results; KEAP1_p.D479Y; B0801
YGTNRLNSA

SEQ ID NO: 24479 - protein, 9 aa, Homo sapiens
  AACR GENIE Results; KEAP1_p.D479Y; A0301
LLYAVGGFY

SEQ ID NO: 24480 - protein, 10 aa, Homo sapiens
  AACR GENIE Results; KEAP1_p.D479Y; A0301
AVGGFYGTNR

SEQ ID NO: 24481 - protein, 10 aa, Homo sapiens
  AACR GENIE Results; KEAP1_p.D479Y; A0201
LLYAVGGFYG

SEQ ID NO: 24482 - protein, 9 aa, Homo sapiens
  AACR GENIE Results; KEAP1_p.D479Y; A0101
LLYAVGGFY

SEQ ID NO: 24483 - protein, 9 aa, Homo sapiens
  AACR GENIE Results; KEAP1_p.E192K; A1101
AIGIANFAK

SEQ ID NO: 24484 - protein, 10 aa, Homo sapiens
  AACR GENIE Results; KEAP1_p.E192K; A6801
NAIGIANFAK

SEQ ID NO: 24485 - protein, 9 aa, Homo sapiens
  AACR GENIE Results; KEAP1_p.E192K; A0301
AIGIANFAK

SEQ ID NO: 24486 - protein, 11 aa, Homo sapiens
  AACR GENIE Results; KEAP1_p.E192K; A3101
KQIGCVELHQR

SEQ ID NO: 24487 - protein, 10 aa, Homo sapiens
  AACR GENIE Results; KEAP1_p.E192K; A1101
NAIGIANFAK

SEQ ID NO: 24488 - protein, 8 aa, Homo sapiens
  AACR GENIE Results; KEAP1_p.E192K; B5101
IANFAKQI

SEQ ID NO: 24489 - protein, 9 aa, Homo sapiens
  AACR GENIE Results; KEAP1_p.E192K; B1501
KQIGCVELH

SEQ ID NO: 24490 - protein, 8 aa, Homo sapiens
  AACR GENIE Results; KEAP1_p.E192K; B1501
KQIGCVEL

SEQ ID NO: 24491 - protein, 9 aa, Homo sapiens
  AACR GENIE Results; KEAP1_p.E219K; B4403
GEVAKQEKF

SEQ ID NO: 24492 - protein, 9 aa, Homo sapiens
  AACR GENIE Results; KEAP1_p.E219K; B4001
GEVAKQEKF

SEQ ID NO: 24493 - protein, 10 aa, Homo sapiens
  AACR GENIE Results; KEAP1_p.E219K; B4403
GEVAKQEKFF

SEQ ID NO: 24494 - protein, 9 aa, Homo sapiens
  AACR GENIE Results; KEAP1_p.E219K; B4402
GEVAKQEKF

SEQ ID NO: 24495 - protein, 9 aa, Homo sapiens
  AACR GENIE Results; KEAP1_p.E219K; A2601
EVAKQEKFF

SEQ ID NO: 24496 - protein, 10 aa, Homo sapiens
  AACR GENIE Results; KEAP1_p.E219K; B4402
GEVAKQEKFF

SEQ ID NO: 24497 - protein, 9 aa, Homo sapiens
  AACR GENIE Results; KEAP1_p.E542Dfs*31; A1101
RSPHEAPAK

SEQ ID NO: 24498 - protein, 9 aa, Homo sapiens
  AACR GENIE Results; KEAP1_p.E542Dfs*31; B0702
SPHEAPAKC

SEQ ID NO: 24499 - protein, 8 aa, Homo sapiens
  AACR GENIE Results; KEAP1_p.G186C; B5101
DPSNAICI

SEQ ID NO: 24500 - protein, 10 aa, Homo sapiens
  AACR GENIE Results; KEAP1_p.G186C; A0201
QLDPSNAICI

SEQ ID NO: 24501 - protein, 10 aa, Homo sapiens
  AACR GENIE Results; KEAP1_p.G186C; B4001
QLDPSNAICI

SEQ ID NO: 24502 - protein, 11 aa, Homo sapiens
  AACR GENIE Results; KEAP1_p.G186V; B3501
DPSNAIVIANF

SEQ ID NO: 24503 - protein, 9 aa, Homo sapiens
  AACR GENIE Results; KEAP1_p.G186V; A0201
QLDPSNAIV

SEQ ID NO: 24504 - protein, 8 aa, Homo sapiens
  AACR GENIE Results; KEAP1_p.G186V; B3501
DPSNAIVI

SEQ ID NO: 24505 - protein, 9 aa, Homo sapiens
  AACR GENIE Results; KEAP1_p.G332Afs*68; B3501
TAAATSDSR

SEQ ID NO: 24506 - protein, 11 aa, Homo sapiens
  AACR GENIE Results; KEAP1_p.G332Afs*68; B4402
AATSDSRSATW

SEQ ID NO: 24507 - protein, 10 aa, Homo sapiens
  AACR GENIE Results; KEAP1_p.G332Afs*68; B3501
TPVTAPGSGW

SEQ ID NO: 24508 - protein, 9 aa, Homo sapiens
  AACR GENIE Results; KEAP1_p.G332Afs*68; A0101
TSDSRSATW

SEQ ID NO: 24509 - protein, 11 aa, Homo sapiens
  AACR GENIE Results; KEAP1_p.G332Afs*68; A0101
YTAAATSDSRS

SEQ ID NO: 24510 - protein, 10 aa, Homo sapiens
  AACR GENIE Results; KEAP1_p.G332Afs*68; B0702
TPAPWTVTTP

SEQ ID NO: 24511 - protein, 9 aa, Homo sapiens
  AACR GENIE Results; KEAP1_p.G332Afs*68; A1101
LTTPVTAPG

SEQ ID NO: 24512 - protein, 9 aa, Homo sapiens
  AACR GENIE Results; KEAP1_p.G332Afs*68; B3501
TATPTPAPW

SEQ ID NO: 24513 - protein, 10 aa, Homo sapiens
  AACR GENIE Results; KEAP1_p.G332Afs*68; B4402
ATSDSRSATW

SEQ ID NO: 24514 - protein, 8 aa, Homo sapiens
  AACR GENIE Results; KEAP1_p.G332Afs*68; B4402
SDSRSATW

SEQ ID NO: 24515 - protein, 9 aa, Homo sapiens
  AACR GENIE Results; KEAP1_p.G332Afs*68; B4402
TSDSRSATW

SEQ ID NO: 24516 - protein, 8 aa, Homo sapiens
  AACR GENIE Results; KEAP1_p.G332C; B0801
CGYFRQSL

SEQ ID NO: 24517 - protein, 9 aa, Homo sapiens
  AACR GENIE Results; KEAP1_p.G333C; A2902
CYFRQSLSY

SEQ ID NO: 24518 - protein, 8 aa, Homo sapiens
  AACR GENIE Results; KEAP1_p.G333C; C1402
IYTAGCYF

SEQ ID NO: 24519 - protein, 9 aa, Homo sapiens
  AACR GENIE Results; KEAP1_p.G333C; C1402
CYFRQSLSY

SEQ ID NO: 24520 - protein, 9 aa, Homo sapiens
  AACR GENIE Results; KEAP1_p.G333C; A3101
IYTAGCYFR

SEQ ID NO: 24521 - protein, 9 aa, Homo sapiens
  AACR GENIE Results; KEAP1_p.G333C; B1501
RLIYTAGCY

SEQ ID NO: 24522 - protein, 8 aa, Homo sapiens
  AACR GENIE Results; KEAP1_p.G333C; A2301
IYTAGCYF

SEQ ID NO: 24523 - protein, 9 aa, Homo sapiens
  AACR GENIE Results; KEAP1_p.G371S; A6802
VVSGLLYAV

SEQ ID NO: 24524 - protein, 9 aa, Homo sapiens
  AACR GENIE Results; KEAP1_p.G371S; A0205
VVSGLLYAV

SEQ ID NO: 24525 - protein, 9 aa, Homo sapiens
  AACR GENIE Results; KEAP1_p.G371S; A0201
VVSGLLYAV

SEQ ID NO: 24526 - protein, 9 aa, Homo sapiens
  AACR GENIE Results; KEAP1_p.G371S; B1302
VVSGLLYAV

SEQ ID NO: 24527 - protein, 9 aa, Homo sapiens
  AACR GENIE Results; KEAP1_p.G371S; B5001
CVVSGLLYA

SEQ ID NO: 24528 - protein, 9 aa, Homo sapiens
  AACR GENIE Results; KEAP1_p.G371S; B1501
GCVVSGLLY

SEQ ID NO: 24529 - protein, 9 aa, Homo sapiens
  AACR GENIE Results; KEAP1_p.G371S; B5001
VVSGLLYAV

SEQ ID NO: 24530 - protein, 9 aa, Homo sapiens
  AACR GENIE Results; KEAP1_p.G371S; B1503
GCVVSGLLY

SEQ ID NO: 24531 - protein, 10 aa, Homo sapiens
  AACR GENIE Results; KEAP1_p.G371S; A6802
CVVSGLLYAV

SEQ ID NO: 24532 - protein, 9 aa, Homo sapiens
  AACR GENIE Results; KEAP1_p.G371S; C1502
VVSGLLYAV

SEQ ID NO: 24533 - protein, 10 aa, Homo sapiens
  AACR GENIE Results; KEAP1_p.G371S; B2702
SGLLYAVGGR

SEQ ID NO: 24534 - protein, 8 aa, Homo sapiens
  AACR GENIE Results; KEAP1_p.G371S; B5801
VSGLLYAV

SEQ ID NO: 24535 - protein, 9 aa, Homo sapiens
  AACR GENIE Results; KEAP1_p.G371S; A3101
VVSGLLYAV

SEQ ID NO: 24536 - protein, 9 aa, Homo sapiens
  AACR GENIE Results; KEAP1_p.G371S; A0205
CVVSGLLYA

SEQ ID NO: 24537 - protein, 9 aa, Homo sapiens
  AACR GENIE Results; KEAP1_p.G371S; A2902
GCVVSGLLY

SEQ ID NO: 24538 - protein, 9 aa, Homo sapiens
  AACR GENIE Results; KEAP1_p.G371S; A3001
VVSGLLYAV

SEQ ID NO: 24539 - protein, 11 aa, Homo sapiens
  AACR GENIE Results; KEAP1_p.G417V; B3501
IVVGVIDGHIY

SEQ ID NO: 24540 - protein, 10 aa, Homo sapiens
  AACR GENIE Results; KEAP1_p.G417V; B0702
VPRNRIVVGV

SEQ ID NO: 24541 - protein, 8 aa, Homo sapiens
  AACR GENIE Results; KEAP1_p.G429V; B5101
DGHIYAVV

SEQ ID NO: 24542 - protein, 9 aa, Homo sapiens
  AACR GENIE Results; KEAP1_p.G429V; A0301
HIYAVVGSH

SEQ ID NO: 24543 - protein, 9 aa, Homo sapiens
  AACR GENIE Results; KEAP1_p.G430C; A0301
HIYAVGCSH

SEQ ID NO: 24544 - protein, 8 aa, Homo sapiens
  AACR GENIE Results; KEAP1_p.G480V; C0401
GFDVTNRL

SEQ ID NO: 24545 - protein, 10 aa, Homo sapiens
  AACR GENIE Results; KEAP1_p.G480V; A1101
AVGGFDVTNR

SEQ ID NO: 24546 - protein, 9 aa, Homo sapiens
  AACR GENIE Results; KEAP1_p.G480V; B0801
DVTNRLNSA

SEQ ID NO: 24547 - protein, 10 aa, Homo sapiens
  AACR GENIE Results; KEAP1_p.G480V; A0201
LLYAVGGFDV

SEQ ID NO: 24548 - protein, 9 aa, Homo sapiens
  AACR GENIE Results; KEAP1_p.G480V; B4001
GGFDVTNRL

SEQ ID NO: 24549 - protein, 8 aa, Homo sapiens
  AACR GENIE Results; KEAP1_p.G480V; C0303
YAVGGFDV

SEQ ID NO: 24550 - protein, 8 aa, Homo sapiens
  AACR GENIE Results; KEAP1_p.G480V; C0304
YAVGGFDV

SEQ ID NO: 24551 - protein, 9 aa, Homo sapiens
  AACR GENIE Results; KEAP1_p.G480V; B3501
YAVGGFDVT

SEQ ID NO: 24552 - protein, 10 aa, Homo sapiens
  AACR GENIE Results; KEAP1_p.G480V; A0201
YAVGGFDVTN

SEQ ID NO: 24553 - protein, 8 aa, Homo sapiens
  AACR GENIE Results; KEAP1_p.G480V; B3501
YAVGGFDV

SEQ ID NO: 24554 - protein, 10 aa, Homo sapiens
  AACR GENIE Results; KEAP1_p.G480W; A3101
AVGGFDWTNR

SEQ ID NO: 24555 - protein, 10 aa, Homo sapiens
  AACR GENIE Results; KEAP1_p.G480W; B5701
LLYAVGGFDW

SEQ ID NO: 24556 - protein, 8 aa, Homo sapiens
  AACR GENIE Results; KEAP1_p.G480W; B5701
YAVGGFDW

SEQ ID NO: 24557 - protein, 9 aa, Homo sapiens
  AACR GENIE Results; KEAP1_p.G480W; A2402
LYAVGGFDW

SEQ ID NO: 24558 - protein, 9 aa, Homo sapiens
  AACR GENIE Results; KEAP1_p.G480W; A2301
LYAVGGFDW

SEQ ID NO: 24559 - protein, 8 aa, Homo sapiens
  AACR GENIE Results; KEAP1_p.G480W; C1601
YAVGGFDW

SEQ ID NO: 24560 - protein, 9 aa, Homo sapiens
  AACR GENIE Results; KEAP1_p.G509W; B3501
TAMNTIRSW

SEQ ID NO: 24561 - protein, 9 aa, Homo sapiens
  AACR GENIE Results; KEAP1_p.G511S; B0702
TIRSGASVC

SEQ ID NO: 24562 - protein, 11 aa, Homo sapiens
  AACR GENIE Results; KEAP1_p.G511S; A0301
TIRSGASVCVL

SEQ ID NO: 24563 - protein, 9 aa, Homo sapiens
  AACR GENIE Results; KEAP1_p.G511S; C0304
NTIRSGASV

SEQ ID NO: 24564 - protein, 9 aa, Homo sapiens
  AACR GENIE Results; KEAP1_p.G511S; A2601
NTIRSGASV

SEQ ID NO: 24565 - protein, 8 aa, Homo sapiens
  AACR GENIE Results; KEAP1_p.G524Afs*8; B5101
YAAGAMMV

SEQ ID NO: 24566 - protein, 8 aa, Homo sapiens
  AACR GENIE Results; KEAP1_p.G524Afs*8; C1203
YAAGAMMV

SEQ ID NO: 24567 - protein, 9 aa, Homo sapiens
  AACR GENIE Results; KEAP1_p.G524Afs*8; A2402
IYAAGAMMV

SEQ ID NO: 24568 - protein, 8 aa, Homo sapiens
  AACR GENIE Results; KEAP1_p.G524Afs*8; A1101
AAGAMMVR

SEQ ID NO: 24569 - protein, 8 aa, Homo sapiens
  AACR GENIE Results; KEAP1_p.G524Afs*8; B1501
GAMMVRTS

SEQ ID NO: 24570 - protein, 9 aa, Homo sapiens
  AACR GENIE Results; KEAP1_p.G524Afs*8; A1101
YAAGAMMVR

SEQ ID NO: 24571 - protein, 8 aa, Homo sapiens
  AACR GENIE Results; KEAP1_p.G524Afs*8; B3501
YAAGAMMV

SEQ ID NO: 24572 - protein, 9 aa, Homo sapiens
  AACR GENIE Results; KEAP1_p.G524Afs*8; B3501
YAAGAMMVR

SEQ ID NO: 24573 - protein, 8 aa, Homo sapiens
  AACR GENIE Results; KEAP1_p.G558R; B1501
SALRITVH

SEQ ID NO: 24574 - protein, 9 aa, Homo sapiens
  AACR GENIE Results; KEAP1_p.G558R; C0602
RRSALRITV

SEQ ID NO: 24575 - protein, 11 aa, Homo sapiens
  AACR GENIE Results; KEAP1_p.G558W; A3101
SALWITVHQGR

SEQ ID NO: 24576 - protein, 9 aa, Homo sapiens
  AACR GENIE Results; KEAP1_p.G603V; B3501
SVVGVAVTM

SEQ ID NO: 24577 - protein, 9 aa, Homo sapiens
  AACR GENIE Results; KEAP1_p.G603V; B1501
SVVGVAVTM

SEQ ID NO: 24578 - protein, 9 aa, Homo sapiens
  AACR GENIE Results; KEAP1_p.G603V; A2601
SVVGVAVTM

SEQ ID NO: 24579 - protein, 9 aa, Homo sapiens
  AACR GENIE Results; KEAP1_p.G603V; C0304
SVVGVAVTM

SEQ ID NO: 24580 - protein, 9 aa, Homo sapiens
  AACR GENIE Results; KEAP1_p.G603V; C0202
SVVGVAVTM

SEQ ID NO: 24581 - protein, 9 aa, Homo sapiens
  AACR GENIE Results; KEAP1_p.G603V; C0303
SVVGVAVTM

SEQ ID NO: 24582 - protein, 9 aa, Homo sapiens
  AACR GENIE Results; KEAP1_p.G603V; A1101
SVVGVAVTM

SEQ ID NO: 24583 - protein, 9 aa, Homo sapiens
  AACR GENIE Results; KEAP1_p.G603V; B0702
SVVGVAVTM

SEQ ID NO: 24584 - protein, 10 aa, Homo sapiens
  AACR GENIE Results; KEAP1_p.G603V; B0702
SGRSVVGVAV

SEQ ID NO: 24585 - protein, 9 aa, Homo sapiens
  AACR GENIE Results; KEAP1_p.G603V; C1203
SVVGVAVTM

SEQ ID NO: 24586 - protein, 9 aa, Homo sapiens
  AACR GENIE Results; KEAP1_p.G603V; C0602
GRSVVGVAV

SEQ ID NO: 24587 - protein, 8 aa, Homo sapiens
  AACR GENIE Results; KEAP1_p.G603V; B3501
VVGVAVTM

SEQ ID NO: 24588 - protein, 9 aa, Homo sapiens
  AACR GENIE Results; KEAP1_p.G603W; B3501
SWVGVAVTM

SEQ ID NO: 24589 - protein, 9 aa, Homo sapiens
  AACR GENIE Results; KEAP1_p.G603W; C0602
GRSWVGVAV

SEQ ID NO: 24590 - protein, 9 aa, Homo sapiens
  AACR GENIE Results; KEAP1_p.H311R; B0702
TLRKPTQVM

SEQ ID NO: 24591 - protein, 9 aa, Homo sapiens
  AACR GENIE Results; KEAP1_p.H311R; B1501
TLRKPTQVM

SEQ ID NO: 24592 - protein, 10 aa, Homo sapiens
  AACR GENIE Results; KEAP1_p.H311R; A0301
KIFEELTLRK

SEQ ID NO: 24593 - protein, 11 aa, Homo sapiens
  AACR GENIE Results; KEAP1_p.L237V; A6801
TLISRDDVNVR

SEQ ID NO: 24594 - protein, 9 aa, Homo sapiens
  AACR GENIE Results; KEAP1_p.L237V; A6801
ISRDDVNVR

SEQ ID NO: 24595 - protein, 9 aa, Homo sapiens
  AACR GENIE Results; KEAP1_p.L237V; B5701
ISRDDVNVR

SEQ ID NO: 24596 - protein, 9 aa, Homo sapiens
  AACR GENIE Results; KEAP1_p.L281M; B0702
TPNFMQMQL

SEQ ID NO: 24597 - protein, 9 aa, Homo sapiens
  AACR GENIE Results; KEAP1_p.L281M; B3501
TPNFMQMQL

SEQ ID NO: 24598 - protein, 9 aa, Homo sapiens
  AACR GENIE Results; KEAP1_p.L281M; B1501
SLTPNFMQM

SEQ ID NO: 24599 - protein, 9 aa, Homo sapiens
  AACR GENIE Results; KEAP1_p.L70P; B4001
NEPRLSQQL

SEQ ID NO: 24600 - protein, 8 aa, Homo sapiens
  AACR GENIE Results; KEAP1_p.L70P; B0702
EPRLSQQL

SEQ ID NO: 24601 - protein, 10 aa, Homo sapiens
  AACR GENIE Results; KEAP1_p.L70P; A6801
QAFGIMNEPR

SEQ ID NO: 24602 - protein, 11 aa, Homo sapiens
  AACR GENIE Results; KEAP1_p.L70P; A0201
IMNEPRLSQQL

SEQ ID NO: 24603 - protein, 9 aa, Homo sapiens
  AACR GENIE Results; KEAP1_p.L70P; C0304
FGIMNEPRL

SEQ ID NO: 24604 - protein, 11 aa, Homo sapiens
  AACR GENIE Results; KEAP1_p.L70P; B1501
IMNEPRLSQQL

SEQ ID NO: 24605 - protein, 9 aa, Homo sapiens
  AACR GENIE Results; KEAP1_p.L70P; B1801
NEPRLSQQL

SEQ ID NO: 24606 - protein, 8 aa, Homo sapiens
  AACR GENIE Results; KEAP1_p.L70P; B0801
EPRLSQQL

SEQ ID NO: 24607 - protein, 9 aa, Homo sapiens
  AACR GENIE Results; KEAP1_p.L70P; A0201
FGIMNEPRL

SEQ ID NO: 24608 - protein, 9 aa, Homo sapiens
  AACR GENIE Results; KEAP1_p.L70P; B4403
NEPRLSQQL

SEQ ID NO: 24609 - protein, 9 aa, Homo sapiens
  AACR GENIE Results; KEAP1_p.M161I; B3501
HVMNGAVIY

SEQ ID NO: 24610 - protein, 9 aa, Homo sapiens
  AACR GENIE Results; KEAP1_p.M161I; A0201
AVIYQIDSV

SEQ ID NO: 24611 - protein, 11 aa, Homo sapiens
  AACR GENIE Results; KEAP1_p.M161I; A1101
AVIYQIDSVVR

SEQ ID NO: 24612 - protein, 10 aa, Homo sapiens
  AACR GENIE Results; KEAP1_p.M161I; A1101
VIYQIDSVVR

SEQ ID NO: 24613 - protein, 9 aa, Homo sapiens
  AACR GENIE Results; KEAP1_p.M610I; B5101
SGVGVAVTI

SEQ ID NO: 24614 - protein, 8 aa, Homo sapiens
  AACR GENIE Results; KEAP1_p.M610I; A1101
VTIEPCRK

SEQ ID NO: 24615 - protein, 9 aa, Homo sapiens
  AACR GENIE Results; KEAP1_p.M610I; A1101
AVTIEPCRK

SEQ ID NO: 24616 - protein, 9 aa, Homo sapiens
  AACR GENIE Results; KEAP1_p.M67V; C1203
QAFGIVNEL

SEQ ID NO: 24617 - protein, 9 aa, Homo sapiens
  AACR GENIE Results; KEAP1_p.M67V; B3501
QAFGIVNEL

SEQ ID NO: 24618 - protein, 9 aa, Homo sapiens
  AACR GENIE Results; KEAP1_p.M67V; C0202
QAFGIVNEL

SEQ ID NO: 24619 - protein, 9 aa, Homo sapiens
  AACR GENIE Results; KEAP1_p.M67V; C0304
QAFGIVNEL

SEQ ID NO: 24620 - protein, 9 aa, Homo sapiens
  AACR GENIE Results; KEAP1_p.M67V; C0303
QAFGIVNEL

SEQ ID NO: 24621 - protein, 9 aa, Homo sapiens
  AACR GENIE Results; KEAP1_p.M67V; A6801
QAFGIVNEL

SEQ ID NO: 24622 - protein, 9 aa, Homo sapiens
  AACR GENIE Results; KEAP1_p.M67V; B5101
QAFGIVNEL

SEQ ID NO: 24623 - protein, 9 aa, Homo sapiens
  AACR GENIE Results; KEAP1_p.M67V; C0602
QAFGIVNEL

SEQ ID NO: 24624 - protein, 9 aa, Homo sapiens
  AACR GENIE Results; KEAP1_p.M67V; B1501
QAFGIVNEL

SEQ ID NO: 24625 - protein, 10 aa, Homo sapiens
  AACR GENIE Results; KEAP1_p.M67V; B1501
KQAFGIVNEL

SEQ ID NO: 24626 - protein, 9 aa, Homo sapiens
  AACR GENIE Results; KEAP1_p.M67V; C1601
QAFGIVNEL

SEQ ID NO: 24627 - protein, 10 aa, Homo sapiens
  AACR GENIE Results; KEAP1_p.M67V; A6801
QAFGIVNELR

SEQ ID NO: 24628 - protein, 9 aa, Homo sapiens
  AACR GENIE Results; KEAP1_p.M67V; B0702
QAFGIVNEL

SEQ ID NO: 24629 - protein, 9 aa, Homo sapiens
  AACR GENIE Results; KEAP1_p.M67V; B5701
QAFGIVNEL

SEQ ID NO: 24630 - protein, 9 aa, Homo sapiens
  AACR GENIE Results; KEAP1_p.M67V; C0303
FGIVNELRL

SEQ ID NO: 24631 - protein, 9 aa, Homo sapiens
  AACR GENIE Results; KEAP1_p.M67V; C0304
FGIVNELRL

SEQ ID NO: 24632 - protein, 11 aa, Homo sapiens
  AACR GENIE Results; KEAP1_p.M67V; B0702
IVNELRLSQQL

SEQ ID NO: 24633 - protein, 8 aa, Homo sapiens
  AACR GENIE Results; KEAP1_p.M67V; B1402
AFGIVNEL

SEQ ID NO: 24634 - protein, 9 aa, Homo sapiens
  AACR GENIE Results; KEAP1_p.M67V; A2601
QAFGIVNEL

SEQ ID NO: 24635 - protein, 8 aa, Homo sapiens
  AACR GENIE Results; KEAP1_p.N414Y; B3501
APMSVPRY

SEQ ID NO: 24636 - protein, 8 aa, Homo sapiens
  AACR GENIE Results; KEAP1_p.N414Y; B0702
APMSVPRY

SEQ ID NO: 24637 - protein, 9 aa, Homo sapiens
  AACR GENIE Results; KEAP1_p.P361L; B0801
DLQVLRSGL

SEQ ID NO: 24638 - protein, 9 aa, Homo sapiens
  AACR GENIE Results; KEAP1_p.P361L; A0301
RLADLQVLR

SEQ ID NO: 24639 - protein, 9 aa, Homo sapiens
  AACR GENIE Results; KEAP1_p.P361L; A1101
RLADLQVLR

SEQ ID NO: 24640 - protein, 9 aa, Homo sapiens
  AACR GENIE Results; KEAP1_p.R261W; C0602
QRWFYVQAL

SEQ ID NO: 24641 - protein, 9 aa, Homo sapiens
  AACR GENIE Results; KEAP1_p.R272L; B1402
VQALLRAVL

SEQ ID NO: 24642 - protein, 9 aa, Homo sapiens
  AACR GENIE Results; KEAP1_p.R272L; B1501
VQALLRAVL

SEQ ID NO: 24643 - protein, 8 aa, Homo sapiens
  AACR GENIE Results; KEAP1_p.R272L; B0801
QALLRAVL

SEQ ID NO: 24644 - protein, 8 aa, Homo sapiens
  AACR GENIE Results; KEAP1_p.R272L; B1402
QALLRAVL

SEQ ID NO: 24645 - protein, 9 aa, Homo sapiens
  AACR GENIE Results; KEAP1_p.R272L; B1402
LRAVLCHSL

SEQ ID NO: 24646 - protein, 9 aa, Homo sapiens
  AACR GENIE Results; KEAP1_p.R272L; A0301
ALLRAVLCH

SEQ ID NO: 24647 - protein, 9 aa, Homo sapiens
  AACR GENIE Results; KEAP1_p.R272L; B1302
VQALLRAVL

SEQ ID NO: 24648 - protein, 8 aa, Homo sapiens
  AACR GENIE Results; KEAP1_p.R320L; B5101
MPCLAPKV

SEQ ID NO: 24649 - protein, 9 aa, Homo sapiens
  AACR GENIE Results; KEAP1_p.R320L; B0702
KPTQVMPCL

SEQ ID NO: 24650 - protein, 9 aa, Homo sapiens
  AACR GENIE Results; KEAP1_p.R320L; A1101
QVMPCLAPK

SEQ ID NO: 24651 - protein, 9 aa, Homo sapiens
  AACR GENIE Results; KEAP1_p.R320L; A0301
QVMPCLAPK

SEQ ID NO: 24652 - protein, 8 aa, Homo sapiens
  AACR GENIE Results; KEAP1_p.R362Q; B1501
LQVPQSGL

SEQ ID NO: 24653 - protein, 11 aa, Homo sapiens
  AACR GENIE Results; KEAP1_p.R362Q; C0802
LADLQVPQSGL

SEQ ID NO: 24654 - protein, 9 aa, Homo sapiens
  AACR GENIE Results; KEAP1_p.R362Q; B0801
DLQVPQSGL

SEQ ID NO: 24655 - protein, 9 aa, Homo sapiens
  AACR GENIE Results; KEAP1_p.R413Vfs*45; B3501
TAASTTTVW

SEQ ID NO: 24656 - protein, 9 aa, Homo sapiens
  AACR GENIE Results; KEAP1_p.R413Vfs*45; A0201
SMATSMPSA

SEQ ID NO: 24657 - protein, 9 aa, Homo sapiens
  AACR GENIE Results; KEAP1_p.R413Vfs*45; B3501
MPSAAPTAA

SEQ ID NO: 24658 - protein, 9 aa, Homo sapiens
  AACR GENIE Results; KEAP1_p.R413Vfs*45; C1203
TAASTTTVW

SEQ ID NO: 24659 - protein, 11 aa, Homo sapiens
  AACR GENIE Results; KEAP1_p.R413Vfs*45; B3501
APTAASTTTVW

SEQ ID NO: 24660 - protein, 10 aa, Homo sapiens
  AACR GENIE Results; KEAP1_p.R413Vfs*45; A0201
SMPSAAPTAA

SEQ ID NO: 24661 - protein, 9 aa, Homo sapiens
  AACR GENIE Results; KEAP1_p.R413Vfs*45; B1501
TAASTTTVW

SEQ ID NO: 24662 - protein, 8 aa, Homo sapiens
  AACR GENIE Results; KEAP1_p.R413Vfs*45; B5101
TAASTTTV

SEQ ID NO: 24663 - protein, 10 aa, Homo sapiens
  AACR GENIE Results; KEAP1_p.R413Vfs*45; B0702
APTAASTTTV

SEQ ID NO: 24664 - protein, 8 aa, Homo sapiens
  AACR GENIE Results; KEAP1_p.R413Vfs*45; B3501
MPSAAPTA

SEQ ID NO: 24665 - protein, 8 aa, Homo sapiens
  AACR GENIE Results; KEAP1_p.R413Vfs*45; B5101
MPSAAPTA

SEQ ID NO: 24666 - protein, 9 aa, Homo sapiens
  AACR GENIE Results; KEAP1_p.R413Vfs*45; B3501
TASGWGSSM

SEQ ID NO: 24667 - protein, 9 aa, Homo sapiens
  AACR GENIE Results; KEAP1_p.R413Vfs*45; C1601
STTTVWRGM

SEQ ID NO: 24668 - protein, 9 aa, Homo sapiens
  AACR GENIE Results; KEAP1_p.R413Vfs*45; B0702
MPSAAPTAA

SEQ ID NO: 24669 - protein, 9 aa, Homo sapiens
  AACR GENIE Results; KEAP1_p.R413Vfs*45; A0201
SMPSAAPTA

SEQ ID NO: 24670 - protein, 9 aa, Homo sapiens
  AACR GENIE Results; KEAP1_p.R413Vfs*45; A3201
SQSGMSGTW

SEQ ID NO: 24671 - protein, 9 aa, Homo sapiens
  AACR GENIE Results; KEAP1_p.R413Vfs*45; B1501
SQSGMSGTW

SEQ ID NO: 24672 - protein, 11 aa, Homo sapiens
  AACR GENIE Results; KEAP1_p.R413Vfs*45; B0801
TSMPSAAPTAA

SEQ ID NO: 24673 - protein, 11 aa, Homo sapiens
  AACR GENIE Results; KEAP1_p.R413Vfs*45; A1101
ATSMPSAAPTA

SEQ ID NO: 24674 - protein, 9 aa, Homo sapiens
  AACR GENIE Results; KEAP1_p.R413Vfs*45; C0102
SMPSAAPTA

SEQ ID NO: 24675 - protein, 9 aa, Homo sapiens
  AACR GENIE Results; KEAP1_p.R413Vfs*45; C0304
TASGWGSSM

SEQ ID NO: 24676 - protein, 11 aa, Homo sapiens
  AACR GENIE Results; KEAP1_p.R413Vfs*45; B3501
SGWGSSMATSM

SEQ ID NO: 24677 - protein, 11 aa, Homo sapiens
  AACR GENIE Results; KEAP1_p.R413Vfs*45; B0702
APTAASTTTVW

SEQ ID NO: 24678 - protein, 9 aa, Homo sapiens
  AACR GENIE Results; KEAP1_p.R413Vfs*45; B0702
APTAASTTT

SEQ ID NO: 24679 - protein, 8 aa, Homo sapiens
  AACR GENIE Results; KEAP1_p.R413Vfs*45; B5101
MATSMPSA

SEQ ID NO: 24680 - protein, 10 aa, Homo sapiens
  AACR GENIE Results; KEAP1_p.R415G; B0702
APMSVPRNGI

SEQ ID NO: 24681 - protein, 10 aa, Homo sapiens
  AACR GENIE Results; KEAP1_p.R415G; B0702
VPRNGIGVGV

SEQ ID NO: 24682 - protein, 8 aa, Homo sapiens
  AACR GENIE Results; KEAP1_p.R415G; B0702
VPRNGIGV

SEQ ID NO: 24683 - protein, 8 aa, Homo sapiens
  AACR GENIE Results; KEAP1_p.R415G; B5101
VPRNGIGV

SEQ ID NO: 24684 - protein, 11 aa, Homo sapiens
  AACR GENIE Results; KEAP1_p.R415G; B0702
VPRNGIGVGVI

SEQ ID NO: 24685 - protein, 10 aa, Homo sapiens
  AACR GENIE Results; KEAP1_p.R415G; B5101
VPRNGIGVGV

SEQ ID NO: 24686 - protein, 8 aa, Homo sapiens
  AACR GENIE Results; KEAP1_p.R415G; B5101
NGIGVGVI

SEQ ID NO: 24687 - protein, 11 aa, Homo sapiens
  AACR GENIE Results; KEAP1_p.R415G; B5101
VPRNGIGVGVI

SEQ ID NO: 24688 - protein, 10 aa, Homo sapiens
  AACR GENIE Results; KEAP1_p.R415H; B0702
APMSVPRNHI

SEQ ID NO: 24689 - protein, 10 aa, Homo sapiens
  AACR GENIE Results; KEAP1_p.R415H; B0702
VPRNHIGVGV

SEQ ID NO: 24690 - protein, 8 aa, Homo sapiens
  AACR GENIE Results; KEAP1_p.R415H; B5101
VPRNHIGV

SEQ ID NO: 24691 - protein, 8 aa, Homo sapiens
  AACR GENIE Results; KEAP1_p.R415H; B0702
VPRNHIGV

SEQ ID NO: 24692 - protein, 11 aa, Homo sapiens
  AACR GENIE Results; KEAP1_p.R536P; B4403
VEPYDVETETW

SEQ ID NO: 24693 - protein, 10 aa, Homo sapiens
  AACR GENIE Results; KEAP1_p.R536P; B3501
EPYDVETETW

SEQ ID NO: 24694 - protein, 11 aa, Homo sapiens
  AACR GENIE Results; KEAP1_p.R536P; B4402
VEPYDVETETW

SEQ ID NO: 24695 - protein, 9 aa, Homo sapiens
  AACR GENIE Results; KEAP1_p.R601L; A0201
GLSGVGVAV

SEQ ID NO: 24696 - protein, 9 aa, Homo sapiens
  AACR GENIE Results; KEAP1_p.R601L; B1302
GLSGVGVAV

SEQ ID NO: 24697 - protein, 9 aa, Homo sapiens
  AACR GENIE Results; KEAP1_p.R601L; A2601
EVTRMTSGL

SEQ ID NO: 24698 - protein, 10 aa, Homo sapiens
  AACR GENIE Results; KEAP1_p.R601L; B4001
SEVTRMTSGL

SEQ ID NO: 24699 - protein, 9 aa, Homo sapiens
  AACR GENIE Results; KEAP1_p.R601L; B1501
GLSGVGVAV

SEQ ID NO: 24700 - protein, 10 aa, Homo sapiens
  AACR GENIE Results; KEAP1_p.R601L; A6801
MTSGLSGVGV

SEQ ID NO: 24701 - protein, 9 aa, Homo sapiens
  AACR GENIE Results; KEAP1_p.R601L; A6801
EVTRMTSGL

SEQ ID NO: 24702 - protein, 9 aa, Homo sapiens
  AACR GENIE Results; KEAP1_p.R601L; B3801
GLSGVGVAV

SEQ ID NO: 24703 - protein, 9 aa, Homo sapiens
  AACR GENIE Results; KEAP1_p.R601L; A0201
RMTSGLSGV

SEQ ID NO: 24704 - protein, 9 aa, Homo sapiens
  AACR GENIE Results; KEAP1_p.R601L; A3001
GLSGVGVAV

SEQ ID NO: 24705 - protein, 10 aa, Homo sapiens
  AACR GENIE Results; KEAP1_p.R601L; A3001
SGLSGVGVAV

SEQ ID NO: 24706 - protein, 10 aa, Homo sapiens
  AACR GENIE Results; KEAP1_p.R601L; A0201
SGLSGVGVAV

SEQ ID NO: 24707 - protein, 11 aa, Homo sapiens
  AACR GENIE Results; KEAP1_p.R601L; A6801
MTSGLSGVGVA

SEQ ID NO: 24708 - protein, 8 aa, Homo sapiens
  AACR GENIE Results; KEAP1_p.R601L; C1502
LSGVGVAV

SEQ ID NO: 24709 - protein, 9 aa, Homo sapiens
  AACR GENIE Results; KEAP1_p.R601L; B2705
GLSGVGVAV

SEQ ID NO: 24710 - protein, 8 aa, Homo sapiens
  AACR GENIE Results; KEAP1_p.R601L; C0304
LSGVGVAV

SEQ ID NO: 24711 - protein, 10 aa, Homo sapiens
  AACR GENIE Results; KEAP1_p.R601L; B1302
SGLSGVGVAV

SEQ ID NO: 24712 - protein, 10 aa, Homo sapiens
  AACR GENIE Results; KEAP1_p.R601L; B1302
MTSGLSGVGV

SEQ ID NO: 24713 - protein, 8 aa, Homo sapiens
  AACR GENIE Results; KEAP1_p.R601L; C1203
LSGVGVAV

SEQ ID NO: 24714 - protein, 8 aa, Homo sapiens
  AACR GENIE Results; KEAP1_p.R601L; A3001
VTRMTSGL

SEQ ID NO: 24715 - protein, 8 aa, Homo sapiens
  AACR GENIE Results; KEAP1_p.R601L; C1601
LSGVGVAV

SEQ ID NO: 24716 - protein, 8 aa, Homo sapiens
  AACR GENIE Results; KEAP1_p.R601L; B0702
VTRMTSGL

SEQ ID NO: 24717 - protein, 8 aa, Homo sapiens
  AACR GENIE Results; KEAP1_p.R601L; B1501
VTRMTSGL

SEQ ID NO: 24718 - protein, 10 aa, Homo sapiens
  AACR GENIE Results; KEAP1_p.R601L; A1101
SGLSGVGVAV

SEQ ID NO: 24719 - protein, 8 aa, Homo sapiens
  AACR GENIE Results; KEAP1_p.R601L; C0303
LSGVGVAV

SEQ ID NO: 24720 - protein, 9 aa, Homo sapiens
  AACR GENIE Results; KEAP1_p.R71L; B1801
NELLLSQQL

SEQ ID NO: 24721 - protein, 9 aa, Homo sapiens
  AACR GENIE Results; KEAP1_p.R71L; B4001
NELLLSQQL

SEQ ID NO: 24722 - protein, 9 aa, Homo sapiens
  AACR GENIE Results; KEAP1_p.R71L; B4403
NELLLSQQL

SEQ ID NO: 24723 - protein, 9 aa, Homo sapiens
  AACR GENIE Results; KEAP1_p.R71L; A0201
LLSQQLCDV

SEQ ID NO: 24724 - protein, 9 aa, Homo sapiens
  AACR GENIE Results; KEAP1_p.R71L; B4402
NELLLSQQL

SEQ ID NO: 24725 - protein, 10 aa, Homo sapiens
  AACR GENIE Results; KEAP1_p.R71L; A0201
LLLSQQLCDV

SEQ ID NO: 24726 - protein, 9 aa, Homo sapiens
  AACR GENIE Results; KEAP1_p.T142M; C0304
FAYMASISM

SEQ ID NO: 24727 - protein, 9 aa, Homo sapiens
  AACR GENIE Results; KEAP1_p.T142M; B3501
FAYMASISM

SEQ ID NO: 24728 - protein, 9 aa, Homo sapiens
  AACR GENIE Results; KEAP1_p.T142M; C1203
FAYMASISM

SEQ ID NO: 24729 - protein, 10 aa, Homo sapiens
  AACR GENIE Results; KEAP1_p.T142M; A0301
YMASISMGEK

SEQ ID NO: 24730 - protein, 9 aa, Homo sapiens
  AACR GENIE Results; KEAP1_p.T142M; A0301
MASISMGEK

SEQ ID NO: 24731 - protein, 9 aa, Homo sapiens
  AACR GENIE Results; KEAP1_p.T142M; A1101
MASISMGEK

SEQ ID NO: 24732 - protein, 8 aa, Homo sapiens
  AACR GENIE Results; KEAP1_p.V155F; B1501
FMNGAVMY

SEQ ID NO: 24733 - protein, 8 aa, Homo sapiens
  AACR GENIE Results; KEAP1_p.V155F; B3501
FMNGAVMY

SEQ ID NO: 24734 - protein, 9 aa, Homo sapiens
  AACR GENIE Results; KEAP1_p.V168F; B1501
VMYQIDSVF

SEQ ID NO: 24735 - protein, 9 aa, Homo sapiens
  AACR GENIE Results; KEAP1_p.V168F; A0201
YQIDSVFRA

SEQ ID NO: 24736 - protein, 10 aa, Homo sapiens
  AACR GENIE Results; KEAP1_p.V168F; B1501
AVMYQIDSVF

SEQ ID NO: 24737 - protein, 11 aa, Homo sapiens
  AACR GENIE Results; KEAP1_p.V168F; A1101
AVMYQIDSVFR

SEQ ID NO: 24738 - protein, 9 aa, Homo sapiens
  AACR GENIE Results; KEAP1_p.V168F; B1501
YQIDSVFRA

SEQ ID NO: 24739 - protein, 10 aa, Homo sapiens
  AACR GENIE Results; KEAP1_p.V168F; A1101
VMYQIDSVFR

SEQ ID NO: 24740 - protein, 10 aa, Homo sapiens
  AACR GENIE Results; KEAP1_p.V271L; C1402
FYVQALLRAL

SEQ ID NO: 24741 - protein, 9 aa, Homo sapiens
  AACR GENIE Results; KEAP1_p.V271L; C0303
YVQALLRAL

SEQ ID NO: 24742 - protein, 8 aa, Homo sapiens
  AACR GENIE Results; KEAP1_p.V271L; B1501
VQALLRAL

SEQ ID NO: 24743 - protein, 8 aa, Homo sapiens
  AACR GENIE Results; KEAP1_p.V271L; B1402
VQALLRAL

SEQ ID NO: 24744 - protein, 9 aa, Homo sapiens
  AACR GENIE Results; KEAP1_p.V271L; C0304
YVQALLRAL

SEQ ID NO: 24745 - protein, 9 aa, Homo sapiens
  AACR GENIE Results; KEAP1_p.V271L; B0801
YVQALLRAL

SEQ ID NO: 24746 - protein, 9 aa, Homo sapiens
  AACR GENIE Results; KEAP1_p.V271L; C0102
YVQALLRAL

SEQ ID NO: 24747 - protein, 9 aa, Homo sapiens
  AACR GENIE Results; KEAP1_p.V271L; B0702
YVQALLRAL

SEQ ID NO: 24748 - protein, 9 aa, Homo sapiens
  AACR GENIE Results; KEAP1_p.V271L; C1402
YVQALLRAL

SEQ ID NO: 24749 - protein, 9 aa, Homo sapiens
  AACR GENIE Results; KEAP1_p.V271L; A6802
YVQALLRAL

SEQ ID NO: 24750 - protein, 9 aa, Homo sapiens
  AACR GENIE Results; KEAP1_p.V271L; A0301
YVQALLRAL

SEQ ID NO: 24751 - protein, 9 aa, Homo sapiens
  AACR GENIE Results; KEAP1_p.V271L; C1502
YVQALLRAL

SEQ ID NO: 24752 - protein, 11 aa, Homo sapiens
  AACR GENIE Results; KEAP1_p.V568F; A2402
YFLGGYDGHTF

SEQ ID NO: 24753 - protein, 9 aa, Homo sapiens
  AACR GENIE Results; KEAP1_p.W252L; B3501
HACINLVKY

SEQ ID NO: 24754 - protein, 9 aa, Homo sapiens
  AACR GENIE Results; KEAP1_p.Y162C; A0201
AVMCQIDSV

SEQ ID NO: 24755 - protein, 9 aa, Homo sapiens
  AACR GENIE Results; KEAP1_p.Y162C; A0201
CQIDSVVRA

SEQ ID NO: 24756 - protein, 9 aa, Homo sapiens
  AACR GENIE Results; KEAP1_p.Y162C; B1501
CQIDSVVRA

SEQ ID NO: 24757 - protein, 11 aa, Homo sapiens
  AACR GENIE Results; KIT_p.G265S; B4002
SDFNYERQATL

SEQ ID NO: 24758 - protein, 9 aa, Homo sapiens
  AACR GENIE Results; KIT_p.G265S; B5001
SDFNYERQA

SEQ ID NO: 24759 - protein, 9 aa, Homo sapiens
  AACR GENIE Results; KIT_p.G265S; A6802
HHSDFNYER

SEQ ID NO: 24760 - protein, 8 aa, Homo sapiens
  AACR GENIE Results; KIT_p.G265S; A3303
HSDFNYER

SEQ ID NO: 24761 - protein, 10 aa, Homo sapiens
  AACR GENIE Results; KIT_p.L576P; A2901
VYIDPTQPPY

SEQ ID NO: 24762 - protein, 9 aa, Homo sapiens
  AACR GENIE Results; KIT_p.L576P; A0101
YIDPTQPPY

SEQ ID NO: 24763 - protein, 10 aa, Homo sapiens
  AACR GENIE Results; KIT_p.L576P; A2902
VYIDPTQPPY

SEQ ID NO: 24764 - protein, 9 aa, Homo sapiens
  AACR GENIE Results; KIT_p.L576P; A2901
YIDPTQPPY

SEQ ID NO: 24765 - protein, 9 aa, Homo sapiens
  AACR GENIE Results; KIT_p.L576P; C0302
YIDPTQPPY

SEQ ID NO: 24766 - protein, 9 aa, Homo sapiens
  AACR GENIE Results; KIT_p.L576P; B3901
YIDPTQPPY

SEQ ID NO: 24767 - protein, 10 aa, Homo sapiens
  AACR GENIE Results; KIT_p.L576P; A3002
VYIDPTQPPY

SEQ ID NO: 24768 - protein, 9 aa, Homo sapiens
  AACR GENIE Results; KIT_p.L576P; B3508
YIDPTQPPY

SEQ ID NO: 24769 - protein, 10 aa, Homo sapiens
  AACR GENIE Results; KIT_p.L576P; C1402
VYIDPTQPPY

SEQ ID NO: 24770 - protein, 9 aa, Homo sapiens
  AACR GENIE Results; KIT_p.L576P; B1502
YIDPTQPPY

SEQ ID NO: 24771 - protein, 9 aa, Homo sapiens
  AACR GENIE Results; KIT_p.L576P; B3501
YIDPTQPPY

SEQ ID NO: 24772 - protein, 9 aa, Homo sapiens
  AACR GENIE Results; KIT_p.L576P; B5801
YIDPTQPPY

SEQ ID NO: 24773 - protein, 9 aa, Homo sapiens
  AACR GENIE Results; KIT_p.L576P; A2902
YIDPTQPPY

SEQ ID NO: 24774 - protein, 9 aa, Homo sapiens
  AACR GENIE Results; KIT_p.L576P; A0207
YIDPTQPPY

SEQ ID NO: 24775 - protein, 10 aa, Homo sapiens
  AACR GENIE Results; KIT_p.L576P; A2301
VYIDPTQPPY

SEQ ID NO: 24776 - protein, 9 aa, Homo sapiens
  AACR GENIE Results; KIT_p.L576P; A1101
YIDPTQPPY

SEQ ID NO: 24777 - protein, 9 aa, Homo sapiens
  AACR GENIE Results; KIT_p.L576P; A2601
YIDPTQPPY

SEQ ID NO: 24778 - protein, 10 aa, Homo sapiens
  AACR GENIE Results; KIT_p.L576P; B4601
VYIDPTQPPY

SEQ ID NO: 24779 - protein, 9 aa, Homo sapiens
  AACR GENIE Results; KIT_p.L576P; A0201
YIDPTQPPY

SEQ ID NO: 24780 - protein, 9 aa, Homo sapiens
  AACR GENIE Results; KIT_p.L576P; C0801
YIDPTQPPY

SEQ ID NO: 24781 - protein, 9 aa, Homo sapiens
  AACR GENIE Results; KIT_p.L576P; B2702
YIDPTQPPY

SEQ ID NO: 24782 - protein, 9 aa, Homo sapiens
  AACR GENIE Results; KIT_p.L576P; A3303
VYIDPTQPP

SEQ ID NO: 24783 - protein, 11 aa, Homo sapiens
  AACR GENIE Results; KIT_p.L576P; A2901
YVYIDPTQPPY

SEQ ID NO: 24784 - protein, 9 aa, Homo sapiens
  AACR GENIE Results; KIT_p.L576P; A2901
VYIDPTQPP

SEQ ID NO: 24785 - protein, 9 aa, Homo sapiens
  AACR GENIE Results; KIT_p.L576P; B1501
YIDPTQPPY

SEQ ID NO: 24786 - protein, 9 aa, Homo sapiens
  AACR GENIE Results; KIT_p.L576P; B3502
YIDPTQPPY

SEQ ID NO: 24787 - protein, 10 aa, Homo sapiens
  AACR GENIE Results; KIT_p.L576P; B1503
VYIDPTQPPY

SEQ ID NO: 24788 - protein, 10 aa, Homo sapiens
  AACR GENIE Results; KIT_p.L576P; B2702
VYIDPTQPPY

SEQ ID NO: 24789 - protein, 9 aa, Homo sapiens
  AACR GENIE Results; KIT_p.L576P; A6801
YIDPTQPPY

SEQ ID NO: 24790 - protein, 9 aa, Homo sapiens
  AACR GENIE Results; KIT_p.L576P; A0301
YIDPTQPPY

SEQ ID NO: 24791 - protein, 11 aa, Homo sapiens
  AACR GENIE Results; KIT_p.L576P; A2902
YVYIDPTQPPY

SEQ ID NO: 24792 - protein, 10 aa, Homo sapiens
  AACR GENIE Results; KIT_p.L576P; A2402
VYIDPTQPPY

SEQ ID NO: 24793 - protein, 10 aa, Homo sapiens
  AACR GENIE Results; KIT_p.L576P; A1101
VYIDPTQPPY

SEQ ID NO: 24794 - protein, 9 aa, Homo sapiens
  AACR GENIE Results; KMT2D_p.L3723_Q3724dup; B1501
QQQQQQVQL

SEQ ID NO: 24795 - protein, 10 aa, Homo sapiens
  AACR GENIE Results; KMT2D_p.R1918H; B5501
YPLEPHFPTA

SEQ ID NO: 24796 - protein, 11 aa, Homo sapiens
  AACR GENIE Results; KRAS_p.A146T; B2702
IPFIETSTKTR

SEQ ID NO: 24797 - protein, 10 aa, Homo sapiens
  AACR GENIE Results; KRAS_p.A146T; B2702
GIPFIETSTK

SEQ ID NO: 24798 - protein, 11 aa, Homo sapiens
  AACR GENIE Results; KRAS_p.A146T; A6801
IPFIETSTKTR

SEQ ID NO: 24799 - protein, 8 aa, Homo sapiens
  AACR GENIE Results; KRAS_p.A146T; B5502
IPFIETST

SEQ ID NO: 24800 - protein, 10 aa, Homo sapiens
  AACR GENIE Results; KRAS_p.A146T; B5502
IPFIETSTKT

SEQ ID NO: 24801 - protein, 9 aa, Homo sapiens
  AACR GENIE Results; KRAS_p.A146T; B5101
IPFIETSTK

SEQ ID NO: 24802 - protein, 8 aa, Homo sapiens
  AACR GENIE Results; KRAS_p.A146V; B5101
IPFIETSV

SEQ ID NO: 24803 - protein, 8 aa, Homo sapiens
  AACR GENIE Results; KRAS_p.A146V; B3906
IPFIETSV

SEQ ID NO: 24804 - protein, 8 aa, Homo sapiens
  AACR GENIE Results; KRAS_p.A146V; B5501
IPFIETSV

SEQ ID NO: 24805 - protein, 9 aa, Homo sapiens
  AACR GENIE Results; KRAS_p.A146V; A0206
GIPFIETSV

SEQ ID NO: 24806 - protein, 9 aa, Homo sapiens
  AACR GENIE Results; KRAS_p.A146V; B1302
GIPFIETSV

SEQ ID NO: 24807 - protein, 9 aa, Homo sapiens
  AACR GENIE Results; KRAS_p.A146V; A0205
GIPFIETSV

SEQ ID NO: 24808 - protein, 9 aa, Homo sapiens
  AACR GENIE Results; KRAS_p.A146V; A6801
FIETSVKTR

SEQ ID NO: 24809 - protein, 11 aa, Homo sapiens
  AACR GENIE Results; KRAS_p.A146V; A6801
IPFIETSVKTR

SEQ ID NO: 24810 - protein, 9 aa, Homo sapiens
  AACR GENIE Results; KRAS_p.A146V; A6802
GIPFIETSV

SEQ ID NO: 24811 - protein, 11 aa, Homo sapiens
  AACR GENIE Results; KRAS_p.A146V; B2702
IPFIETSVKTR

SEQ ID NO: 24812 - protein, 9 aa, Homo sapiens
  AACR GENIE Results; KRAS_p.A146V; A0201
GIPFIETSV

SEQ ID NO: 24813 - protein, 10 aa, Homo sapiens
  AACR GENIE Results; KRAS_p.A146V; B2702
GIPFIETSVK

SEQ ID NO: 24814 - protein, 10 aa, Homo sapiens
  AACR GENIE Results; KRAS_p.A59T; A0101
ILDTTGQEEY

SEQ ID NO: 24815 - protein, 10 aa, Homo sapiens
  AACR GENIE Results; KRAS_p.A59T; B5801
ILDTTGQEEY

SEQ ID NO: 24816 - protein, 10 aa, Homo sapiens
  AACR GENIE Results; KRAS_p.A59T; B1501
ILDTTGQEEY

SEQ ID NO: 24817 - protein, 9 aa, Homo sapiens
  AACR GENIE Results; KRAS_p.A59T; B3502
TGQEEYSAM

SEQ ID NO: 24818 - protein, 11 aa, Homo sapiens
  AACR GENIE Results; KRAS_p.A59T; B2702
DILDTTGQEEY

SEQ ID NO: 24819 - protein, 11 aa, Homo sapiens
  AACR GENIE Results; KRAS_p.A59T; A3301
DILDTTGQEEY

SEQ ID NO: 24820 - protein, 11 aa, Homo sapiens
  AACR GENIE Results; KRAS_p.A59T; B3501
DILDTTGQEEY

SEQ ID NO: 24821 - protein, 10 aa, Homo sapiens
  AACR GENIE Results; KRAS_p.A59T; B3901
ILDTTGQEEY

SEQ ID NO: 24822 - protein, 10 aa, Homo sapiens
  AACR GENIE Results; KRAS_p.A59T; A2902
ILDTTGQEEY

SEQ ID NO: 24823 - protein, 9 aa, Homo sapiens
  AACR GENIE Results; KRAS_p.A59T; B3503
TGQEEYSAM

SEQ ID NO: 24824 - protein, 9 aa, Homo sapiens
  AACR GENIE Results; KRAS_p.A59T; B3501
TGQEEYSAM

SEQ ID NO: 24825 - protein, 10 aa, Homo sapiens
  AACR GENIE Results; KRAS_p.A59T; B3501
ILDTTGQEEY

SEQ ID NO: 24826 - protein, 10 aa, Homo sapiens
  AACR GENIE Results; KRAS_p.A59T; B2702
ILDTTGQEEY

SEQ ID NO: 24827 - protein, 11 aa, Homo sapiens
  AACR GENIE Results; KRAS_p.A59T; A2601
DILDTTGQEEY

SEQ ID NO: 24828 - protein, 11 aa, Homo sapiens
  AACR GENIE Results; KRAS_p.A59T; A6801
TTGQEEYSAMR

SEQ ID NO: 24829 - protein, 9 aa, Homo sapiens
  AACR GENIE Results; KRAS_p.A59T; B3501
LDTTGQEEY

SEQ ID NO: 24830 - protein, 11 aa, Homo sapiens
  AACR GENIE Results; KRAS_p.A59T; A0101
DILDTTGQEEY

SEQ ID NO: 24831 - protein, 9 aa, Homo sapiens
  AACR GENIE Results; KRAS_p.A59T; A0101
LDTTGQEEY

SEQ ID NO: 24832 - protein, 11 aa, Homo sapiens
  AACR GENIE Results; KRAS_p.A59T; A6801
DILDTTGQEEY

SEQ ID NO: 24833 - protein, 9 aa, Homo sapiens
  AACR GENIE Results; KRAS_p.A59T; B1801
LDTTGQEEY

SEQ ID NO: 24834 - protein, 11 aa, Homo sapiens
  AACR GENIE Results; KRAS_p.A59T; B3901
DILDTTGQEEY

SEQ ID NO: 24835 - protein, 10 aa, Homo sapiens
  AACR GENIE Results; KRAS_p.A59T; B3801
ILDTTGQEEY

SEQ ID NO: 24836 - protein, 9 aa, Homo sapiens
  AACR GENIE Results; KRAS_p.A59T; B3901
TGQEEYSAM

SEQ ID NO: 24837 - protein, 11 aa, Homo sapiens
  AACR GENIE Results; KRAS_p.D33E; B1801
DEYEPTIEDSY

SEQ ID NO: 24838 - protein, 9 aa, Homo sapiens
  AACR GENIE Results; KRAS_p.D33E; C0802
FVDEYEPTI

SEQ ID NO: 24839 - protein, 9 aa, Homo sapiens
  AACR GENIE Results; KRAS_p.D33E; C0501
FVDEYEPTI

SEQ ID NO: 24840 - protein, 9 aa, Homo sapiens
  AACR GENIE Results; KRAS_p.D33E; B3801
FVDEYEPTI

SEQ ID NO: 24841 - protein, 9 aa, Homo sapiens
  AACR GENIE Results; KRAS_p.D33E; A0201
FVDEYEPTI

SEQ ID NO: 24842 - protein, 9 aa, Homo sapiens
  AACR GENIE Results; KRAS_p.D33E; B1801
YEPTIEDSY

SEQ ID NO: 24843 - protein, 9 aa, Homo sapiens
  AACR GENIE Results; KRAS_p.D33E; B5101
FVDEYEPTI

SEQ ID NO: 24844 - protein, 9 aa, Homo sapiens
  AACR GENIE Results; KRAS_p.D33E; B1302
FVDEYEPTI

SEQ ID NO: 24845 - protein, 8 aa, Homo sapiens
  AACR GENIE Results; KRAS_p.D33E; B3501
EPTIEDSY

SEQ ID NO: 24846 - protein, 11 aa, Homo sapiens
  AACR GENIE Results; KRAS_p.D33E; B4403
DEYEPTIEDSY

SEQ ID NO: 24847 - protein, 9 aa, Homo sapiens
  AACR GENIE Results; KRAS_p.D33E; B4403
YEPTIEDSY

SEQ ID NO: 24848 - protein, 9 aa, Homo sapiens
  AACR GENIE Results; KRAS_p.D33E; B3501
YEPTIEDSY

SEQ ID NO: 24849 - protein, 9 aa, Homo sapiens
  AACR GENIE Results; KRAS_p.D33E; A2902
YEPTIEDSY

SEQ ID NO: 24850 - protein, 9 aa, Homo sapiens
  AACR GENIE Results; KRAS_p.D33E; B1501
YEPTIEDSY

SEQ ID NO: 24851 - protein, 9 aa, Homo sapiens
  AACR GENIE Results; KRAS_p.D33E; A2301
YEPTIEDSY

SEQ ID NO: 24852 - protein, 9 aa, Homo sapiens
  AACR GENIE Results; KRAS_p.D33E; B3501
FVDEYEPTI

SEQ ID NO: 24853 - protein, 9 aa, Homo sapiens
  AACR GENIE Results; KRAS_p.G12A; A0302
VVGAAGVGK

SEQ ID NO: 24854 - protein, 10 aa, Homo sapiens
  AACR GENIE Results; KRAS_p.G12A; A1101
VVVGAAGVGK

SEQ ID NO: 24855 - protein, 10 aa, Homo sapiens
  AACR GENIE Results; KRAS_p.G12A; A0302
VVVGAAGVGK

SEQ ID NO: 24856 - protein, 9 aa, Homo sapiens
  AACR GENIE Results; KRAS_p.G12A; A1101
VVGAAGVGK

SEQ ID NO: 24857 - protein, 10 aa, Homo sapiens
  AACR GENIE Results; KRAS_p.G12A; A0301
VVVGAAGVGK

SEQ ID NO: 24858 - protein, 9 aa, Homo sapiens
  AACR GENIE Results; KRAS_p.G12A; A0301
VVGAAGVGK

SEQ ID NO: 24859 - protein, 10 aa, Homo sapiens
  AACR GENIE Results; KRAS_p.G12A; A6801
VVVGAAGVGK

SEQ ID NO: 24860 - protein, 11 aa, Homo sapiens
  AACR GENIE Results; KRAS_p.G12A; B2702
LVVVGAAGVGK

SEQ ID NO: 24861 - protein, 9 aa, Homo sapiens
  AACR GENIE Results; KRAS_p.G12A; B0702
AAGVGKSAL

SEQ ID NO: 24862 - protein, 9 aa, Homo sapiens
  AACR GENIE Results; KRAS_p.G12A; C0102
AAGVGKSAL

SEQ ID NO: 24863 - protein, 10 aa, Homo sapiens
  AACR GENIE Results; KRAS_p.G12A; B4801
GAAGVGKSAL

SEQ ID NO: 24864 - protein, 11 aa, Homo sapiens
  AACR GENIE Results; KRAS_p.G12A; A0302
LVVVGAAGVGK

SEQ ID NO: 24865 - protein, 10 aa, Homo sapiens
  AACR GENIE Results; KRAS_p.G12A; B1302
AGVGKSALTI

SEQ ID NO: 24866 - protein, 9 aa, Homo sapiens
  AACR GENIE Results; KRAS_p.G12A; A0206
LVVVGAAGV

SEQ ID NO: 24867 - protein, 11 aa, Homo sapiens
  AACR GENIE Results; KRAS_p.G12A; A1101
LVVVGAAGVGK

SEQ ID NO: 24868 - protein, 8 aa, Homo sapiens
  AACR GENIE Results; KRAS_p.G12A; B0801
AGVGKSAL

SEQ ID NO: 24869 - protein, 10 aa, Homo sapiens
  AACR GENIE Results; KRAS_p.G12A; B0702
GAAGVGKSAL

SEQ ID NO: 24870 - protein, 11 aa, Homo sapiens
  AACR GENIE Results; KRAS_p.G12A; A6801
LVVVGAAGVGK

SEQ ID NO: 24871 - protein, 10 aa, Homo sapiens
  AACR GENIE Results; KRAS_p.G12A; B4001
GAAGVGKSAL

SEQ ID NO: 24872 - protein, 11 aa, Homo sapiens
  AACR GENIE Results; KRAS_p.G12A; B5001
TEYKLVVVGAA

SEQ ID NO: 24873 - protein, 10 aa, Homo sapiens
  AACR GENIE Results; KRAS_p.G12A; B2702
VVVGAAGVGK

SEQ ID NO: 24874 - protein, 11 aa, Homo sapiens
  AACR GENIE Results; KRAS_p.G12A; A0301
LVVVGAAGVGK

SEQ ID NO: 24875 - protein, 9 aa, Homo sapiens
  AACR GENIE Results; KRAS_p.G12A; A6801
VVGAAGVGK

SEQ ID NO: 24876 - protein, 11 aa, Homo sapiens
  AACR GENIE Results; KRAS_p.G12A; B0801
VGAAGVGKSAL

SEQ ID NO: 24877 - protein, 10 aa, Homo sapiens
  AACR GENIE Results; KRAS_p.G12A; B1501
GAAGVGKSAL

SEQ ID NO: 24878 - protein, 11 aa, Homo sapiens
  AACR GENIE Results; KRAS_p.G12A; C0704
VVVGAAGVGKS

SEQ ID NO: 24879 - protein, 10 aa, Homo sapiens
  AACR GENIE Results; KRAS_p.G12A; C0304
GAAGVGKSAL

SEQ ID NO: 24880 - protein, 8 aa, Homo sapiens
  AACR GENIE Results; KRAS_p.G12A; B4102
AGVGKSAL

SEQ ID NO: 24881 - protein, 9 aa, Homo sapiens
  AACR GENIE Results; KRAS_p.G12A; C0304
GAAGVGKSA

SEQ ID NO: 24882 - protein, 9 aa, Homo sapiens
  AACR GENIE Results; KRAS_p.G12A; C0304
AAGVGKSAL

SEQ ID NO: 24883 - protein, 11 aa, Homo sapiens
  AACR GENIE Results; KRAS_p.G12A; A2601
VVVGAAGVGKS

SEQ ID NO: 24884 - protein, 9 aa, Homo sapiens
  AACR GENIE Results; KRAS_p.G12A; B3906
YKLVVVGAA

SEQ ID NO: 24885 - protein, 10 aa, Homo sapiens
  AACR GENIE Results; KRAS_p.G12A; A3001
VVVGAAGVGK

SEQ ID NO: 24886 - protein, 10 aa, Homo sapiens
  AACR GENIE Results; KRAS_p.G12A; A0203
KLVVVGAAGV

SEQ ID NO: 24887 - protein, 11 aa, Homo sapiens
  AACR GENIE Results; KRAS_p.G12A; A1101
VVVGAAGVGKS

SEQ ID NO: 24888 - protein, 11 aa, Homo sapiens
  AACR GENIE Results; KRAS_p.G12A; A0206
VVVGAAGVGKS

SEQ ID NO: 24889 - protein, 9 aa, Homo sapiens
  AACR GENIE Results; KRAS_p.G12A; C0801
AAGVGKSAL

SEQ ID NO: 24890 - protein, 8 aa, Homo sapiens
  AACR GENIE Results; KRAS_p.G12A; B0702
AGVGKSAL

SEQ ID NO: 24891 - protein, 8 aa, Homo sapiens
  AACR GENIE Results; KRAS_p.G12A; B1302
VVVGAAGV

SEQ ID NO: 24892 - protein, 9 aa, Homo sapiens
  AACR GENIE Results; KRAS_p.G12A; B0801
AAGVGKSAL

SEQ ID NO: 24893 - protein, 9 aa, Homo sapiens
  AACR GENIE Results; KRAS_p.G12A; A0205
LVVVGAAGV

SEQ ID NO: 24894 - protein, 10 aa, Homo sapiens
  AACR GENIE Results; KRAS_p.G12A; A0201
KLVVVGAAGV

SEQ ID NO: 24895 - protein, 11 aa, Homo sapiens
  AACR GENIE Results; KRAS_p.G12A; B4801
VVVGAAGVGKS

SEQ ID NO: 24896 - protein, 10 aa, Homo sapiens
  AACR GENIE Results; KRAS_p.G12A; C0102
GAAGVGKSAL

SEQ ID NO: 24897 - protein, 9 aa, Homo sapiens
  AACR GENIE Results; KRAS_p.G12A; C1601
AAGVGKSAL

SEQ ID NO: 24898 - protein, 9 aa, Homo sapiens
  AACR GENIE Results; KRAS_p.G12A; B2702
VVGAAGVGK

SEQ ID NO: 24899 - protein, 10 aa, Homo sapiens
  AACR GENIE Results; KRAS_p.G12C; A1101
VVVGACGVGK

SEQ ID NO: 24900 - protein, 9 aa, Homo sapiens
  AACR GENIE Results; KRAS_p.G12C; A0302
VVGACGVGK

SEQ ID NO: 24901 - protein, 10 aa, Homo sapiens
  AACR GENIE Results; KRAS_p.G12C; A0302
VVVGACGVGK

SEQ ID NO: 24902 - protein, 9 aa, Homo sapiens
  AACR GENIE Results; KRAS_p.G12C; A1101
VVGACGVGK

SEQ ID NO: 24903 - protein, 10 aa, Homo sapiens
  AACR GENIE Results; KRAS_p.G12C; A0301
VVVGACGVGK

SEQ ID NO: 24904 - protein, 9 aa, Homo sapiens
  AACR GENIE Results; KRAS_p.G12C; A0301
VVGACGVGK

SEQ ID NO: 24905 - protein, 10 aa, Homo sapiens
  AACR GENIE Results; KRAS_p.G12C; A6801
VVVGACGVGK

SEQ ID NO: 24906 - protein, 9 aa, Homo sapiens
  AACR GENIE Results; KRAS_p.G12C; C0102
ACGVGKSAL

SEQ ID NO: 24907 - protein, 11 aa, Homo sapiens
  AACR GENIE Results; KRAS_p.G12C; A0302
LVVVGACGVGK

SEQ ID NO: 24908 - protein, 9 aa, Homo sapiens
  AACR GENIE Results; KRAS_p.G12C; A0206
LVVVGACGV

SEQ ID NO: 24909 - protein, 9 aa, Homo sapiens
  AACR GENIE Results; KRAS_p.G12C; B0702
ACGVGKSAL

SEQ ID NO: 24910 - protein, 10 aa, Homo sapiens
  AACR GENIE Results; KRAS_p.G12C; B2702
VVVGACGVGK

SEQ ID NO: 24911 - protein, 10 aa, Homo sapiens
  AACR GENIE Results; KRAS_p.G12C; B0702
GACGVGKSAL

SEQ ID NO: 24912 - protein, 8 aa, Homo sapiens
  AACR GENIE Results; KRAS_p.G12C; B0801
CGVGKSAL

SEQ ID NO: 24913 - protein, 8 aa, Homo sapiens
  AACR GENIE Results; KRAS_p.G12D; B1402
DGVGKSAL

SEQ ID NO: 24914 - protein, 10 aa, Homo sapiens
  AACR GENIE Results; KRAS_p.G12D; A1101
VVVGADGVGK

SEQ ID NO: 24915 - protein, 10 aa, Homo sapiens
  AACR GENIE Results; KRAS_p.G12D; A0302
VVVGADGVGK

SEQ ID NO: 24916 - protein, 10 aa, Homo sapiens
  AACR GENIE Results; KRAS_p.G12D; C0802
GADGVGKSAL

SEQ ID NO: 24917 - protein, 8 aa, Homo sapiens
  AACR GENIE Results; KRAS_p.G12D; B0801
DGVGKSAL

SEQ ID NO: 24918 - protein, 9 aa, Homo sapiens
  AACR GENIE Results; KRAS_p.G12D; A0302
VVGADGVGK

SEQ ID NO: 24919 - protein, 11 aa, Homo sapiens
  AACR GENIE Results; KRAS_p.G12D; B2702
LVVVGADGVGK

SEQ ID NO: 24920 - protein, 9 aa, Homo sapiens
  AACR GENIE Results; KRAS_p.G12D; A1101
VVGADGVGK

SEQ ID NO: 24921 - protein, 10 aa, Homo sapiens
  AACR GENIE Results; KRAS_p.G12D; A6801
VVVGADGVGK

SEQ ID NO: 24922 - protein, 11 aa, Homo sapiens
  AACR GENIE Results; KRAS_p.G12D; B4801
VVVGADGVGKS

SEQ ID NO: 24923 - protein, 8 aa, Homo sapiens
  AACR GENIE Results; KRAS_p.G12D; B1401
DGVGKSAL

SEQ ID NO: 24924 - protein, 9 aa, Homo sapiens
  AACR GENIE Results; KRAS_p.G12D; B3701
ADGVGKSAL

SEQ ID NO: 24925 - protein, 9 aa, Homo sapiens
  AACR GENIE Results; KRAS_p.G12D; B0702
ADGVGKSAL

SEQ ID NO: 24926 - protein, 11 aa, Homo sapiens
  AACR GENIE Results; KRAS_p.G12D; C0803
VVVGADGVGKS

SEQ ID NO: 24927 - protein, 10 aa, Homo sapiens
  AACR GENIE Results; KRAS_p.G12D; B5101
DGVGKSALTI

SEQ ID NO: 24928 - protein, 9 aa, Homo sapiens
  AACR GENIE Results; KRAS_p.G12D; B4102
ADGVGKSAL

SEQ ID NO: 24929 - protein, 10 aa, Homo sapiens
  AACR GENIE Results; KRAS_p.G12D; B4001
GADGVGKSAL

SEQ ID NO: 24930 - protein, 11 aa, Homo sapiens
  AACR GENIE Results; KRAS_p.G12D; B0801
VGADGVGKSAL

SEQ ID NO: 24931 - protein, 10 aa, Homo sapiens
  AACR GENIE Results; KRAS_p.G12D; B3502
GADGVGKSAL

SEQ ID NO: 24932 - protein, 10 aa, Homo sapiens
  AACR GENIE Results; KRAS_p.G12D; B1513
GADGVGKSAL

SEQ ID NO: 24933 - protein, 10 aa, Homo sapiens
  AACR GENIE Results; KRAS_p.G12D; B2702
VVVGADGVGK

SEQ ID NO: 24934 - protein, 9 aa, Homo sapiens
  AACR GENIE Results; KRAS_p.G12D; A0206
LVVVGADGV

SEQ ID NO: 24935 - protein, 11 aa, Homo sapiens
  AACR GENIE Results; KRAS_p.G12D; A0302
LVVVGADGVGK

SEQ ID NO: 24936 - protein, 10 aa, Homo sapiens
  AACR GENIE Results; KRAS_p.G12D; B4801
GADGVGKSAL

SEQ ID NO: 24937 - protein, 9 aa, Homo sapiens
  AACR GENIE Results; KRAS_p.G12D; B4002
ADGVGKSAL

SEQ ID NO: 24938 - protein, 10 aa, Homo sapiens
  AACR GENIE Results; KRAS_p.G12D; A0301
VVVGADGVGK

SEQ ID NO: 24939 - protein, 10 aa, Homo sapiens
  AACR GENIE Results; KRAS_p.G12D; C0501
GADGVGKSAL

SEQ ID NO: 24940 - protein, 10 aa, Homo sapiens
  AACR GENIE Results; KRAS_p.G12D; B0702
GADGVGKSAL

SEQ ID NO: 24941 - protein, 10 aa, Homo sapiens
  AACR GENIE Results; KRAS_p.G12D; B1301
GADGVGKSAL

SEQ ID NO: 24942 - protein, 10 aa, Homo sapiens
  AACR GENIE Results; KRAS_p.G12D; C0801
GADGVGKSAL

SEQ ID NO: 24943 - protein, 11 aa, Homo sapiens
  AACR GENIE Results; KRAS_p.G12D; A0206
VVVGADGVGKS

SEQ ID NO: 24944 - protein, 10 aa, Homo sapiens
  AACR GENIE Results; KRAS_p.G12D; C0803
VVGADGVGKS

SEQ ID NO: 24945 - protein, 9 aa, Homo sapiens
  AACR GENIE Results; KRAS_p.G12D; B4405
ADGVGKSAL

SEQ ID NO: 24946 - protein, 10 aa, Homo sapiens
  AACR GENIE Results; KRAS_p.G12D; A2603
VVVGADGVGK

SEQ ID NO: 24947 - protein, 11 aa, Homo sapiens
  AACR GENIE Results; KRAS_p.G12D; A1101
LVVVGADGVGK

SEQ ID NO: 24948 - protein, 9 aa, Homo sapiens
  AACR GENIE Results; KRAS_p.G12D; A0205
LVVVGADGV

SEQ ID NO: 24949 - protein, 10 aa, Homo sapiens
  AACR GENIE Results; KRAS_p.G12D; A0206
KLVVVGADGV

SEQ ID NO: 24950 - protein, 10 aa, Homo sapiens
  AACR GENIE Results; KRAS_p.G12D; A0201
KLVVVGADGV

SEQ ID NO: 24951 - protein, 10 aa, Homo sapiens
  AACR GENIE Results; KRAS_p.G12D; C0102
GADGVGKSAL

SEQ ID NO: 24952 - protein, 10 aa, Homo sapiens
  AACR GENIE Results; KRAS_p.G12D; B1302
KLVVVGADGV

SEQ ID NO: 24953 - protein, 11 aa, Homo sapiens
  AACR GENIE Results; KRAS_p.G12D; B3901
VGADGVGKSAL

SEQ ID NO: 24954 - protein, 11 aa, Homo sapiens
  AACR GENIE Results; KRAS_p.G12D; A2601
VVVGADGVGKS

SEQ ID NO: 24955 - protein, 10 aa, Homo sapiens
  AACR GENIE Results; KRAS_p.G12D; A0204
KLVVVGADGV

SEQ ID NO: 24956 - protein, 10 aa, Homo sapiens
  AACR GENIE Results; KRAS_p.G12D; B4801
VVVGADGVGK

SEQ ID NO: 24957 - protein, 10 aa, Homo sapiens
  AACR GENIE Results; KRAS_p.G12D; B3503
GADGVGKSAL

SEQ ID NO: 24958 - protein, 9 aa, Homo sapiens
  AACR GENIE Results; KRAS_p.G12F; A1101
VVGAFGVGK

SEQ ID NO: 24959 - protein, 10 aa, Homo sapiens
  AACR GENIE Results; KRAS_p.G12F; A1101
VVVGAFGVGK

SEQ ID NO: 24960 - protein, 9 aa, Homo sapiens
  AACR GENIE Results; KRAS_p.G12F; A0301
VVGAFGVGK

SEQ ID NO: 24961 - protein, 9 aa, Homo sapiens
  AACR GENIE Results; KRAS_p.G12F; C1402
AFGVGKSAL

SEQ ID NO: 24962 - protein, 8 aa, Homo sapiens
  AACR GENIE Results; KRAS_p.G12F; B0801
FGVGKSAL

SEQ ID NO: 24963 - protein, 10 aa, Homo sapiens
  AACR GENIE Results; KRAS_p.G12F; C0304
GAFGVGKSAL

SEQ ID NO: 24964 - protein, 11 aa, Homo sapiens
  AACR GENIE Results; KRAS_p.G12F; B2702
LVVVGAFGVGK

SEQ ID NO: 24965 - protein, 10 aa, Homo sapiens
  AACR GENIE Results; KRAS_p.G12F; A0301
VVVGAFGVGK

SEQ ID NO: 24966 - protein, 8 aa, Homo sapiens
  AACR GENIE Results; KRAS_p.G12F; B1402
FGVGKSAL

SEQ ID NO: 24967 - protein, 9 aa, Homo sapiens
  AACR GENIE Results; KRAS_p.G12F; B2702
VVGAFGVGK

SEQ ID NO: 24968 - protein, 10 aa, Homo sapiens
  AACR GENIE Results; KRAS_p.G12F; A6801
VVVGAFGVGK

SEQ ID NO: 24969 - protein, 9 aa, Homo sapiens
  AACR GENIE Results; KRAS_p.G12F; C0102
AFGVGKSAL

SEQ ID NO: 24970 - protein, 10 aa, Homo sapiens
  AACR GENIE Results; KRAS_p.G12F; B2702
VVVGAFGVGK

SEQ ID NO: 24971 - protein, 10 aa, Homo sapiens
  AACR GENIE Results; KRAS_p.G12F; C0303
GAFGVGKSAL

SEQ ID NO: 24972 - protein, 10 aa, Homo sapiens
  AACR GENIE Results; KRAS_p.G12F; B1501
GAFGVGKSAL

SEQ ID NO: 24973 - protein, 10 aa, Homo sapiens
  AACR GENIE Results; KRAS_p.G12F; B4001
GAFGVGKSAL

SEQ ID NO: 24974 - protein, 9 aa, Homo sapiens
  AACR GENIE Results; KRAS_p.G12F; A6801
VVGAFGVGK

SEQ ID NO: 24975 - protein, 11 aa, Homo sapiens
  AACR GENIE Results; KRAS_p.G12F; B0801
VGAFGVGKSAL

SEQ ID NO: 24976 - protein, 9 aa, Homo sapiens
  AACR GENIE Results; KRAS_p.G12F; B0702
AFGVGKSAL

SEQ ID NO: 24977 - protein, 8 aa, Homo sapiens
  AACR GENIE Results; KRAS_p.G12F; B1302
VVVGAFGV

SEQ ID NO: 24978 - protein, 10 aa, Homo sapiens
  AACR GENIE Results; KRAS_p.G12F; B0702
GAFGVGKSAL

SEQ ID NO: 24979 - protein, 10 aa, Homo sapiens
  AACR GENIE Results; KRAS_p.G12F; B4002
GAFGVGKSAL

SEQ ID NO: 24980 - protein, 8 aa, Homo sapiens
  AACR GENIE Results; KRAS_p.G12F; B1501
KLVVVGAF

SEQ ID NO: 24981 - protein, 10 aa, Homo sapiens
  AACR GENIE Results; KRAS_p.G12F; B5801
GAFGVGKSAL

SEQ ID NO: 24982 - protein, 10 aa, Homo sapiens
  AACR GENIE Results; KRAS_p.G12F; B5001
GAFGVGKSAL

SEQ ID NO: 24983 - protein, 8 aa, Homo sapiens
  AACR GENIE Results; KRAS_p.G12F; A1101
VGAFGVGK

SEQ ID NO: 24984 - protein, 10 aa, Homo sapiens
  AACR GENIE Results; KRAS_p.G12F; C0102
GAFGVGKSAL

SEQ ID NO: 24985 - protein, 8 aa, Homo sapiens
  AACR GENIE Results; KRAS_p.G12F; C0304
FGVGKSAL

SEQ ID NO: 24986 - protein, 10 aa, Homo sapiens
  AACR GENIE Results; KRAS_p.G12F; A3001
VVVGAFGVGK

SEQ ID NO: 24987 - protein, 10 aa, Homo sapiens
  AACR GENIE Results; KRAS_p.G12F; B1402
GAFGVGKSAL

SEQ ID NO: 24988 - protein, 9 aa, Homo sapiens
  AACR GENIE Results; KRAS_p.G12F; A3101
VVGAFGVGK

SEQ ID NO: 24989 - protein, 10 aa, Homo sapiens
  AACR GENIE Results; KRAS_p.G12F; A3001
GAFGVGKSAL

SEQ ID NO: 24990 - protein, 10 aa, Homo sapiens
  AACR GENIE Results; KRAS_p.G12F; A6802
VVVGAFGVGK

SEQ ID NO: 24991 - protein, 9 aa, Homo sapiens
  AACR GENIE Results; KRAS_p.G12F; B5001
GAFGVGKSA

SEQ ID NO: 24992 - protein, 9 aa, Homo sapiens
  AACR GENIE Results; KRAS_p.G12I; A1101
VVGAIGVGK

SEQ ID NO: 24993 - protein, 10 aa, Homo sapiens
  AACR GENIE Results; KRAS_p.G12I; A1101
VVVGAIGVGK

SEQ ID NO: 24994 - protein, 9 aa, Homo sapiens
  AACR GENIE Results; KRAS_p.G12I; A0301
VVGAIGVGK

SEQ ID NO: 24995 - protein, 10 aa, Homo sapiens
  AACR GENIE Results; KRAS_p.G12I; A0301
VVVGAIGVGK

SEQ ID NO: 24996 - protein, 10 aa, Homo sapiens
  AACR GENIE Results; KRAS_p.G12I; C0304
GAIGVGKSAL

SEQ ID NO: 24997 - protein, 9 aa, Homo sapiens
  AACR GENIE Results; KRAS_p.G12I; B0702
AIGVGKSAL

SEQ ID NO: 24998 - protein, 8 aa, Homo sapiens
  AACR GENIE Results; KRAS_p.G12I; B0801
IGVGKSAL

SEQ ID NO: 24999 - protein, 10 aa, Homo sapiens
  AACR GENIE Results; KRAS_p.G12I; A0201
KLVVVGAIGV

SEQ ID NO: 25000 - protein, 11 aa, Homo sapiens
  AACR GENIE Results; KRAS_p.G12I; B0801
VGAIGVGKSAL

SEQ ID NO: 25001 - protein, 10 aa, Homo sapiens
  AACR GENIE Results; KRAS_p.G12I; B0702
GAIGVGKSAL

SEQ ID NO: 25002 - protein, 9 aa, Homo sapiens
  AACR GENIE Results; KRAS_p.G12I; C0304
GAIGVGKSA

SEQ ID NO: 25003 - protein, 11 aa, Homo sapiens
  AACR GENIE Results; KRAS_p.G12I; A1101
LVVVGAIGVGK

SEQ ID NO: 25004 - protein, 11 aa, Homo sapiens
  AACR GENIE Results; KRAS_p.G12I; A0301
LVVVGAIGVGK

SEQ ID NO: 25005 - protein, 8 aa, Homo sapiens
  AACR GENIE Results; KRAS_p.G12I; B0702
IGVGKSAL

SEQ ID NO: 25006 - protein, 9 aa, Homo sapiens
  AACR GENIE Results; KRAS_p.G12I; B0801
AIGVGKSAL

SEQ ID NO: 25007 - protein, 10 aa, Homo sapiens
  AACR GENIE Results; KRAS_p.G12L; A1101
VVVGALGVGK

SEQ ID NO: 25008 - protein, 9 aa, Homo sapiens
  AACR GENIE Results; KRAS_p.G12L; A1101
VVGALGVGK

SEQ ID NO: 25009 - protein, 10 aa, Homo sapiens
  AACR GENIE Results; KRAS_p.G12L; A6801
VVVGALGVGK

SEQ ID NO: 25010 - protein, 10 aa, Homo sapiens
  AACR GENIE Results; KRAS_p.G12L; A0301
VVVGALGVGK

SEQ ID NO: 25011 - protein, 9 aa, Homo sapiens
  AACR GENIE Results; KRAS_p.G12L; A0301
VVGALGVGK

SEQ ID NO: 25012 - protein, 9 aa, Homo sapiens
  AACR GENIE Results; KRAS_p.G12L; C0102
ALGVGKSAL

SEQ ID NO: 25013 - protein, 10 aa, Homo sapiens
  AACR GENIE Results; KRAS_p.G12L; B4001
GALGVGKSAL

SEQ ID NO: 25014 - protein, 8 aa, Homo sapiens
  AACR GENIE Results; KRAS_p.G12L; B0801
LGVGKSAL

SEQ ID NO: 25015 - protein, 8 aa, Homo sapiens
  AACR GENIE Results; KRAS_p.G12L; B1402
LGVGKSAL

SEQ ID NO: 25016 - protein, 9 aa, Homo sapiens
  AACR GENIE Results; KRAS_p.G12L; B0702
ALGVGKSAL

SEQ ID NO: 25017 - protein, 9 aa, Homo sapiens
  AACR GENIE Results; KRAS_p.G12L; A6801
VVGALGVGK

SEQ ID NO: 25018 - protein, 10 aa, Homo sapiens
  AACR GENIE Results; KRAS_p.G12L; C0304
GALGVGKSAL

SEQ ID NO: 25019 - protein, 8 aa, Homo sapiens
  AACR GENIE Results; KRAS_p.G12L; B1302
VVVGALGV

SEQ ID NO: 25020 - protein, 9 aa, Homo sapiens
  AACR GENIE Results; KRAS_p.G12L; B0801
ALGVGKSAL

SEQ ID NO: 25021 - protein, 11 aa, Homo sapiens
  AACR GENIE Results; KRAS_p.G12L; A6801
VVVGALGVGKS

SEQ ID NO: 25022 - protein, 10 aa, Homo sapiens
  AACR GENIE Results; KRAS_p.G12L; B0702
GALGVGKSAL

SEQ ID NO: 25023 - protein, 11 aa, Homo sapiens
  AACR GENIE Results; KRAS_p.G12L; B0801
VGALGVGKSAL

SEQ ID NO: 25024 - protein, 11 aa, Homo sapiens
  AACR GENIE Results; KRAS_p.G12L; A1101
LVVVGALGVGK

SEQ ID NO: 25025 - protein, 8 aa, Homo sapiens
  AACR GENIE Results; KRAS_p.G12L; B1501
KLVVVGAL

SEQ ID NO: 25026 - protein, 9 aa, Homo sapiens
  AACR GENIE Results; KRAS_p.G12L; B1501
ALGVGKSAL

SEQ ID NO: 25027 - protein, 10 aa, Homo sapiens
  AACR GENIE Results; KRAS_p.G12L; A3001
VVVGALGVGK

SEQ ID NO: 25028 - protein, 11 aa, Homo sapiens
  AACR GENIE Results; KRAS_p.G12L; A6801
LVVVGALGVGK

SEQ ID NO: 25029 - protein, 10 aa, Homo sapiens
  AACR GENIE Results; KRAS_p.G12L; C0303
GALGVGKSAL

SEQ ID NO: 25030 - protein, 10 aa, Homo sapiens
  AACR GENIE Results; KRAS_p.G12R; A1101
VVVGARGVGK

SEQ ID NO: 25031 - protein, 10 aa, Homo sapiens
  AACR GENIE Results; KRAS_p.G12R; A0302
VVVGARGVGK

SEQ ID NO: 25032 - protein, 10 aa, Homo sapiens
  AACR GENIE Results; KRAS_p.G12R; A0301
VVVGARGVGK

SEQ ID NO: 25033 - protein, 10 aa, Homo sapiens
  AACR GENIE Results; KRAS_p.G12R; B0702
GARGVGKSAL

SEQ ID NO: 25034 - protein, 9 aa, Homo sapiens
  AACR GENIE Results; KRAS_p.G12R; A0302
VVGARGVGK

SEQ ID NO: 25035 - protein, 10 aa, Homo sapiens
  AACR GENIE Results; KRAS_p.G12R; A3303
EYKLVVVGAR

SEQ ID NO: 25036 - protein, 9 aa, Homo sapiens
  AACR GENIE Results; KRAS_p.G12R; A0301
VVGARGVGK

SEQ ID NO: 25037 - protein, 9 aa, Homo sapiens
  AACR GENIE Results; KRAS_p.G12R; A1101
VVGARGVGK

SEQ ID NO: 25038 - protein, 9 aa, Homo sapiens
  AACR GENIE Results; KRAS_p.G12R; B1401
ARGVGKSAL

SEQ ID NO: 25039 - protein, 10 aa, Homo sapiens
  AACR GENIE Results; KRAS_p.G12R; A6801
VVVGARGVGK

SEQ ID NO: 25040 - protein, 11 aa, Homo sapiens
  AACR GENIE Results; KRAS_p.G12R; B4801
VVVGARGVGKS

SEQ ID NO: 25041 - protein, 10 aa, Homo sapiens
  AACR GENIE Results; KRAS_p.G12R; A0203
KLVVVGARGV

SEQ ID NO: 25042 - protein, 8 aa, Homo sapiens
  AACR GENIE Results; KRAS_p.G12R; B0801
RGVGKSAL

SEQ ID NO: 25043 - protein, 10 aa, Homo sapiens
  AACR GENIE Results; KRAS_p.G12S; A1101
VVVGASGVGK

SEQ ID NO: 25044 - protein, 9 aa, Homo sapiens
  AACR GENIE Results; KRAS_p.G12S; A1101
VVGASGVGK

SEQ ID NO: 25045 - protein, 10 aa, Homo sapiens
  AACR GENIE Results; KRAS_p.G12S; A0301
VVVGASGVGK

SEQ ID NO: 25046 - protein, 10 aa, Homo sapiens
  AACR GENIE Results; KRAS_p.G12S; A6801
VVVGASGVGK

SEQ ID NO: 25047 - protein, 9 aa, Homo sapiens
  AACR GENIE Results; KRAS_p.G12S; A0301
VVGASGVGK

SEQ ID NO: 25048 - protein, 11 aa, Homo sapiens
  AACR GENIE Results; KRAS_p.G12S; B2702
LVVVGASGVGK

SEQ ID NO: 25049 - protein, 11 aa, Homo sapiens
  AACR GENIE Results; KRAS_p.G12S; C0704
VVVGASGVGKS

SEQ ID NO: 25050 - protein, 8 aa, Homo sapiens
  AACR GENIE Results; KRAS_p.G12S; B0801
SGVGKSAL

SEQ ID NO: 25051 - protein, 9 aa, Homo sapiens
  AACR GENIE Results; KRAS_p.G12S; C0102
ASGVGKSAL

SEQ ID NO: 25052 - protein, 10 aa, Homo sapiens
  AACR GENIE Results; KRAS_p.G12S; B2702
VVVGASGVGK

SEQ ID NO: 25053 - protein, 10 aa, Homo sapiens
  AACR GENIE Results; KRAS_p.G12S; B0702
GASGVGKSAL

SEQ ID NO: 25054 - protein, 11 aa, Homo sapiens
  AACR GENIE Results; KRAS_p.G12S; B0801
VGASGVGKSAL

SEQ ID NO: 25055 - protein, 10 aa, Homo sapiens
  AACR GENIE Results; KRAS_p.G12S; B4001
GASGVGKSAL

SEQ ID NO: 25056 - protein, 11 aa, Homo sapiens
  AACR GENIE Results; KRAS_p.G12S; A6801
VVVGASGVGKS

SEQ ID NO: 25057 - protein, 11 aa, Homo sapiens
  AACR GENIE Results; KRAS_p.G12S; A1101
LVVVGASGVGK

SEQ ID NO: 25058 - protein, 9 aa, Homo sapiens
  AACR GENIE Results; KRAS_p.G12S; A0206
LVVVGASGV

SEQ ID NO: 25059 - protein, 11 aa, Homo sapiens
  AACR GENIE Results; KRAS_p.G12S; A1101
VVVGASGVGKS

SEQ ID NO: 25060 - protein, 10 aa, Homo sapiens
  AACR GENIE Results; KRAS_p.G12S; A0203
KLVVVGASGV

SEQ ID NO: 25061 - protein, 10 aa, Homo sapiens
  AACR GENIE Results; KRAS_p.G12S; A3001
VVVGASGVGK

SEQ ID NO: 25062 - protein, 8 aa, Homo sapiens
  AACR GENIE Results; KRAS_p.G12S; B1402
SGVGKSAL

SEQ ID NO: 25063 - protein, 11 aa, Homo sapiens
  AACR GENIE Results; KRAS_p.G12S; A0301
LVVVGASGVGK

SEQ ID NO: 25064 - protein, 11 aa, Homo sapiens
  AACR GENIE Results; KRAS_p.G12S; A6801
LVVVGASGVGK

SEQ ID NO: 25065 - protein, 9 aa, Homo sapiens
  AACR GENIE Results; KRAS_p.G12S; B0702
ASGVGKSAL

SEQ ID NO: 25066 - protein, 8 aa, Homo sapiens
  AACR GENIE Results; KRAS_p.G12S; B0702
SGVGKSAL

SEQ ID NO: 25067 - protein, 11 aa, Homo sapiens
  AACR GENIE Results; KRAS_p.G12S; A0205
VVVGASGVGKS

SEQ ID NO: 25068 - protein, 9 aa, Homo sapiens
  AACR GENIE Results; KRAS_p.G12S; C0304
GASGVGKSA

SEQ ID NO: 25069 - protein, 8 aa, Homo sapiens
  AACR GENIE Results; KRAS_p.G12S; B1302
VVVGASGV

SEQ ID NO: 25070 - protein, 10 aa, Homo sapiens
  AACR GENIE Results; KRAS_p.G12S; C0102
GASGVGKSAL

SEQ ID NO: 25071 - protein, 8 aa, Homo sapiens
  AACR GENIE Results; KRAS_p.G12S; B4102
SGVGKSAL

SEQ ID NO: 25072 - protein, 10 aa, Homo sapiens
  AACR GENIE Results; KRAS_p.G12S; B1302
SGVGKSALTI

SEQ ID NO: 25073 - protein, 11 aa, Homo sapiens
  AACR GENIE Results; KRAS_p.G12S; A2601
VVVGASGVGKS

SEQ ID NO: 25074 - protein, 10 aa, Homo sapiens
  AACR GENIE Results; KRAS_p.G12S; C0304
GASGVGKSAL

SEQ ID NO: 25075 - protein, 9 aa, Homo sapiens
  AACR GENIE Results; KRAS_p.G12S; A6801
VVGASGVGK

SEQ ID NO: 25076 - protein, 9 aa, Homo sapiens
  AACR GENIE Results; KRAS_p.G12V; A0302
VVGAVGVGK

SEQ ID NO: 25077 - protein, 9 aa, Homo sapiens
  AACR GENIE Results; KRAS_p.G12V; A1101
VVGAVGVGK

SEQ ID NO: 25078 - protein, 9 aa, Homo sapiens
  AACR GENIE Results; KRAS_p.G12V; A0301
VVGAVGVGK

SEQ ID NO: 25079 - protein, 10 aa, Homo sapiens
  AACR GENIE Results; KRAS_p.G12V; A0302
VVVGAVGVGK

SEQ ID NO: 25080 - protein, 10 aa, Homo sapiens
  AACR GENIE Results; KRAS_p.G12V; A1101
VVVGAVGVGK

SEQ ID NO: 25081 - protein, 10 aa, Homo sapiens
  AACR GENIE Results; KRAS_p.G12V; A6801
VVVGAVGVGK

SEQ ID NO: 25082 - protein, 9 aa, Homo sapiens
  AACR GENIE Results; KRAS_p.G12V; C0102
AVGVGKSAL

SEQ ID NO: 25083 - protein, 10 aa, Homo sapiens
  AACR GENIE Results; KRAS_p.G12V; A0301
VVVGAVGVGK

SEQ ID NO: 25084 - protein, 9 aa, Homo sapiens
  AACR GENIE Results; KRAS_p.G12V; A6801
VVGAVGVGK

SEQ ID NO: 25085 - protein, 11 aa, Homo sapiens
  AACR GENIE Results; KRAS_p.G12V; C0803
VVVGAVGVGKS

SEQ ID NO: 25086 - protein, 9 aa, Homo sapiens
  AACR GENIE Results; KRAS_p.G12V; B0702
AVGVGKSAL

SEQ ID NO: 25087 - protein, 9 aa, Homo sapiens
  AACR GENIE Results; KRAS_p.G12V; B2702
VVGAVGVGK

SEQ ID NO: 25088 - protein, 11 aa, Homo sapiens
  AACR GENIE Results; KRAS_p.G12V; B2702
LVVVGAVGVGK

SEQ ID NO: 25089 - protein, 8 aa, Homo sapiens
  AACR GENIE Results; KRAS_p.G12V; B0801
VGVGKSAL

SEQ ID NO: 25090 - protein, 10 aa, Homo sapiens
  AACR GENIE Results; KRAS_p.G12V; B2702
VVVGAVGVGK

SEQ ID NO: 25091 - protein, 10 aa, Homo sapiens
  AACR GENIE Results; KRAS_p.G12V; B4801
GAVGVGKSAL

SEQ ID NO: 25092 - protein, 11 aa, Homo sapiens
  AACR GENIE Results; KRAS_p.G12V; B0801
VGAVGVGKSAL

SEQ ID NO: 25093 - protein, 11 aa, Homo sapiens
  AACR GENIE Results; KRAS_p.G12V; C0704
VVVGAVGVGKS

SEQ ID NO: 25094 - protein, 10 aa, Homo sapiens
  AACR GENIE Results; KRAS_p.G12V; B4001
GAVGVGKSAL

SEQ ID NO: 25095 - protein, 10 aa, Homo sapiens
  AACR GENIE Results; KRAS_p.G12V; A2603
VVVGAVGVGK

SEQ ID NO: 25096 - protein, 10 aa, Homo sapiens
  AACR GENIE Results; KRAS_p.G12V; A0201
KLVVVGAVGV

SEQ ID NO: 25097 - protein, 10 aa, Homo sapiens
  AACR GENIE Results; KRAS_p.G12V; C0304
GAVGVGKSAL

SEQ ID NO: 25098 - protein, 10 aa, Homo sapiens
  AACR GENIE Results; KRAS_p.G12V; A0204
KLVVVGAVGV

SEQ ID NO: 25099 - protein, 9 aa, Homo sapiens
  AACR GENIE Results; KRAS_p.G12V; A0206
LVVVGAVGV

SEQ ID NO: 25100 - protein, 8 aa, Homo sapiens
  AACR GENIE Results; KRAS_p.G12V; B1402
VGVGKSAL

SEQ ID NO: 25101 - protein, 11 aa, Homo sapiens
  AACR GENIE Results; KRAS_p.G12V; A0302
LVVVGAVGVGK

SEQ ID NO: 25102 - protein, 10 aa, Homo sapiens
  AACR GENIE Results; KRAS_p.G12V; A0203
KLVVVGAVGV

SEQ ID NO: 25103 - protein, 8 aa, Homo sapiens
  AACR GENIE Results; KRAS_p.G12V; B1302
VVVGAVGV

SEQ ID NO: 25104 - protein, 8 aa, Homo sapiens
  AACR GENIE Results; KRAS_p.G12V; A0302
VGAVGVGK

SEQ ID NO: 25105 - protein, 9 aa, Homo sapiens
  AACR GENIE Results; KRAS_p.G12V; B1501
AVGVGKSAL

SEQ ID NO: 25106 - protein, 9 aa, Homo sapiens
  AACR GENIE Results; KRAS_p.G12V; B5601
GAVGVGKSA

SEQ ID NO: 25107 - protein, 10 aa, Homo sapiens
  AACR GENIE Results; KRAS_p.G12V; A6802
VVVGAVGVGK

SEQ ID NO: 25108 - protein, 9 aa, Homo sapiens
  AACR GENIE Results; KRAS_p.G12V; A3101
VVGAVGVGK

SEQ ID NO: 25109 - protein, 11 aa, Homo sapiens
  AACR GENIE Results; KRAS_p.G12V; A6801
LVVVGAVGVGK

SEQ ID NO: 25110 - protein, 10 aa, Homo sapiens
  AACR GENIE Results; KRAS_p.G12V; B1302
VGVGKSALTI

SEQ ID NO: 25111 - protein, 10 aa, Homo sapiens
  AACR GENIE Results; KRAS_p.G12V; B4002
GAVGVGKSAL

SEQ ID NO: 25112 - protein, 10 aa, Homo sapiens
  AACR GENIE Results; KRAS_p.G12V; A0206
KLVVVGAVGV

SEQ ID NO: 25113 - protein, 10 aa, Homo sapiens
  AACR GENIE Results; KRAS_p.G12V; C0303
GAVGVGKSAL

SEQ ID NO: 25114 - protein, 11 aa, Homo sapiens
  AACR GENIE Results; KRAS_p.G12V; A1101
LVVVGAVGVGK

SEQ ID NO: 25115 - protein, 9 aa, Homo sapiens
  AACR GENIE Results; KRAS_p.G12V; A3303
VVGAVGVGK

SEQ ID NO: 25116 - protein, 10 aa, Homo sapiens
  AACR GENIE Results; KRAS_p.G12V; C0803
VVGAVGVGKS

SEQ ID NO: 25117 - protein, 8 aa, Homo sapiens
  AACR GENIE Results; KRAS_p.G12V; A0206
VVVGAVGV

SEQ ID NO: 25118 - protein, 8 aa, Homo sapiens
  AACR GENIE Results; KRAS_p.G12V; B1302
KLVVVGAV

SEQ ID NO: 25119 - protein, 9 aa, Homo sapiens
  AACR GENIE Results; KRAS_p.G12V; B0801
AVGVGKSAL

SEQ ID NO: 25120 - protein, 10 aa, Homo sapiens
  AACR GENIE Results; KRAS_p.G12V; B0702
GAVGVGKSAL

SEQ ID NO: 25121 - protein, 11 aa, Homo sapiens
  AACR GENIE Results; KRAS_p.G12V; B4801
VVVGAVGVGKS

SEQ ID NO: 25122 - protein, 9 aa, Homo sapiens
  AACR GENIE Results; KRAS_p.G12V; A0205
LVVVGAVGV

SEQ ID NO: 25123 - protein, 11 aa, Homo sapiens
  AACR GENIE Results; KRAS_p.G12V; A2601
VVVGAVGVGKS

SEQ ID NO: 25124 - protein, 11 aa, Homo sapiens
  AACR GENIE Results; KRAS_p.G12V; A0206
VVVGAVGVGKS

SEQ ID NO: 25125 - protein, 9 aa, Homo sapiens
  AACR GENIE Results; KRAS_p.G12V; C0304
GAVGVGKSA

SEQ ID NO: 25126 - protein, 10 aa, Homo sapiens
  AACR GENIE Results; KRAS_p.G12V; A3101
VVVGAVGVGK

SEQ ID NO: 25127 - protein, 8 aa, Homo sapiens
  AACR GENIE Results; KRAS_p.G12V; B3906
VVVGAVGV

SEQ ID NO: 25128 - protein, 9 aa, Homo sapiens
  AACR GENIE Results; KRAS_p.G12V; A6802
LVVVGAVGV

SEQ ID NO: 25129 - protein, 9 aa, Homo sapiens
  AACR GENIE Results; KRAS_p.G12V; B5401
GAVGVGKSA

SEQ ID NO: 25130 - protein, 8 aa, Homo sapiens
  AACR GENIE Results; KRAS_p.G12V; A1101
VGAVGVGK

SEQ ID NO: 25131 - protein, 10 aa, Homo sapiens
  AACR GENIE Results; KRAS_p.G12V; C0801
GAVGVGKSAL

SEQ ID NO: 25132 - protein, 11 aa, Homo sapiens
  AACR GENIE Results; KRAS_p.G12V; A0301
LVVVGAVGVGK

SEQ ID NO: 25133 - protein, 8 aa, Homo sapiens
  AACR GENIE Results; KRAS_p.G12V; A0203
KLVVVGAV

SEQ ID NO: 25134 - protein, 10 aa, Homo sapiens
  AACR GENIE Results; KRAS_p.G12V; B1501
GAVGVGKSAL

SEQ ID NO: 25135 - protein, 11 aa, Homo sapiens
  AACR GENIE Results; KRAS_p.G12V; A6801
VVVGAVGVGKS

SEQ ID NO: 25136 - protein, 10 aa, Homo sapiens
  AACR GENIE Results; KRAS_p.G12V; A3001
VVVGAVGVGK

SEQ ID NO: 25137 - protein, 10 aa, Homo sapiens
  AACR GENIE Results; KRAS_p.G13C; A1101
VVVGAGCVGK

SEQ ID NO: 25138 - protein, 9 aa, Homo sapiens
  AACR GENIE Results; KRAS_p.G13C; A1101
VVGAGCVGK

SEQ ID NO: 25139 - protein, 10 aa, Homo sapiens
  AACR GENIE Results; KRAS_p.G13C; A6801
VVVGAGCVGK

SEQ ID NO: 25140 - protein, 10 aa, Homo sapiens
  AACR GENIE Results; KRAS_p.G13C; A0301
VVVGAGCVGK

SEQ ID NO: 25141 - protein, 10 aa, Homo sapiens
  AACR GENIE Results; KRAS_p.G13C; B1302
GCVGKSALTI

SEQ ID NO: 25142 - protein, 9 aa, Homo sapiens
  AACR GENIE Results; KRAS_p.G13C; B0801
AGCVGKSAL

SEQ ID NO: 25143 - protein, 10 aa, Homo sapiens
  AACR GENIE Results; KRAS_p.G13C; B2702
VVVGAGCVGK

SEQ ID NO: 25144 - protein, 9 aa, Homo sapiens
  AACR GENIE Results; KRAS_p.G13C; A0301
VVGAGCVGK

SEQ ID NO: 25145 - protein, 9 aa, Homo sapiens
  AACR GENIE Results; KRAS_p.G13C; B1302
CVGKSALTI

SEQ ID NO: 25146 - protein, 9 aa, Homo sapiens
  AACR GENIE Results; KRAS_p.G13C; B0702
AGCVGKSAL

SEQ ID NO: 25147 - protein, 9 aa, Homo sapiens
  AACR GENIE Results; KRAS_p.G13D; C0802
AGDVGKSAL

SEQ ID NO: 25148 - protein, 8 aa, Homo sapiens
  AACR GENIE Results; KRAS_p.G13D; B4102
GDVGKSAL

SEQ ID NO: 25149 - protein, 11 aa, Homo sapiens
  AACR GENIE Results; KRAS_p.G13D; C0803
VVVGAGDVGKS

SEQ ID NO: 25150 - protein, 9 aa, Homo sapiens
  AACR GENIE Results; KRAS_p.G13D; A0302
VVGAGDVGK

SEQ ID NO: 25151 - protein, 10 aa, Homo sapiens
  AACR GENIE Results; KRAS_p.G13D; A0302
VVVGAGDVGK

SEQ ID NO: 25152 - protein, 10 aa, Homo sapiens
  AACR GENIE Results; KRAS_p.G13D; A6801
VVVGAGDVGK

SEQ ID NO: 25153 - protein, 11 aa, Homo sapiens
  AACR GENIE Results; KRAS_p.G13D; C0704
VVVGAGDVGKS

SEQ ID NO: 25154 - protein, 11 aa, Homo sapiens
  AACR GENIE Results; KRAS_p.G13D; B2702
LVVVGAGDVGK

SEQ ID NO: 25155 - protein, 8 aa, Homo sapiens
  AACR GENIE Results; KRAS_p.G13D; B4002
GDVGKSAL

SEQ ID NO: 25156 - protein, 10 aa, Homo sapiens
  AACR GENIE Results; KRAS_p.G13D; A1101
VVVGAGDVGK

SEQ ID NO: 25157 - protein, 9 aa, Homo sapiens
  AACR GENIE Results; KRAS_p.G13D; B5101
DVGKSALTI

SEQ ID NO: 25158 - protein, 10 aa, Homo sapiens
  AACR GENIE Results; KRAS_p.G13D; B2702
VVVGAGDVGK

SEQ ID NO: 25159 - protein, 9 aa, Homo sapiens
  AACR GENIE Results; KRAS_p.G13D; A1101
VVGAGDVGK

SEQ ID NO: 25160 - protein, 9 aa, Homo sapiens
  AACR GENIE Results; KRAS_p.G13D; C0501
AGDVGKSAL

SEQ ID NO: 25161 - protein, 9 aa, Homo sapiens
  AACR GENIE Results; KRAS_p.G13D; B0702
AGDVGKSAL

SEQ ID NO: 25162 - protein, 9 aa, Homo sapiens
  AACR GENIE Results; KRAS_p.G13D; C0801
AGDVGKSAL

SEQ ID NO: 25163 - protein, 10 aa, Homo sapiens
  AACR GENIE Results; KRAS_p.G13D; C0803
VVGAGDVGKS

SEQ ID NO: 25164 - protein, 11 aa, Homo sapiens
  AACR GENIE Results; KRAS_p.G13D; A0302
LVVVGAGDVGK

SEQ ID NO: 25165 - protein, 10 aa, Homo sapiens
  AACR GENIE Results; KRAS_p.G13D; B4002
GDVGKSALTI

SEQ ID NO: 25166 - protein, 8 aa, Homo sapiens
  AACR GENIE Results; KRAS_p.G13D; B0702
GDVGKSAL

SEQ ID NO: 25167 - protein, 11 aa, Homo sapiens
  AACR GENIE Results; KRAS_p.G13D; A6801
LVVVGAGDVGK

SEQ ID NO: 25168 - protein, 10 aa, Homo sapiens
  AACR GENIE Results; KRAS_p.G13D; B1302
GDVGKSALTI

SEQ ID NO: 25169 - protein, 9 aa, Homo sapiens
  AACR GENIE Results; KRAS_p.G13D; A0205
VGAGDVGKS

SEQ ID NO: 25170 - protein, 8 aa, Homo sapiens
  AACR GENIE Results; KRAS_p.G13D; B4801
GDVGKSAL

SEQ ID NO: 25171 - protein, 10 aa, Homo sapiens
  AACR GENIE Results; KRAS_p.G13D; B0702
GAGDVGKSAL

SEQ ID NO: 25172 - protein, 9 aa, Homo sapiens
  AACR GENIE Results; KRAS_p.G13D; C0304
AGDVGKSAL

SEQ ID NO: 25173 - protein, 10 aa, Homo sapiens
  AACR GENIE Results; KRAS_p.G13D; A0206
VVVGAGDVGK

SEQ ID NO: 25174 - protein, 11 aa, Homo sapiens
  AACR GENIE Results; KRAS_p.G13D; B4801
VVVGAGDVGKS

SEQ ID NO: 25175 - protein, 11 aa, Homo sapiens
  AACR GENIE Results; KRAS_p.G13D; A1101
LVVVGAGDVGK

SEQ ID NO: 25176 - protein, 9 aa, Homo sapiens
  AACR GENIE Results; KRAS_p.G13D; B3502
AGDVGKSAL

SEQ ID NO: 25177 - protein, 10 aa, Homo sapiens
  AACR GENIE Results; KRAS_p.G13E; A1101
VVVGAGEVGK

SEQ ID NO: 25178 - protein, 8 aa, Homo sapiens
  AACR GENIE Results; KRAS_p.G13E; B4001
GEVGKSAL

SEQ ID NO: 25179 - protein, 11 aa, Homo sapiens
  AACR GENIE Results; KRAS_p.G13E; B0801
VGAGEVGKSAL

SEQ ID NO: 25180 - protein, 10 aa, Homo sapiens
  AACR GENIE Results; KRAS_p.G13E; B4001
GEVGKSALTI

SEQ ID NO: 25181 - protein, 9 aa, Homo sapiens
  AACR GENIE Results; KRAS_p.G13E; A1101
VVGAGEVGK

SEQ ID NO: 25182 - protein, 10 aa, Homo sapiens
  AACR GENIE Results; KRAS_p.G13E; B4403
GEVGKSALTI

SEQ ID NO: 25183 - protein, 11 aa, Homo sapiens
  AACR GENIE Results; KRAS_p.G13E; A1101
LVVVGAGEVGK

SEQ ID NO: 25184 - protein, 9 aa, Homo sapiens
  AACR GENIE Results; KRAS_p.G13E; B0702
AGEVGKSAL

SEQ ID NO: 25185 - protein, 10 aa, Homo sapiens
  AACR GENIE Results; KRAS_p.G13E; A0201
KLVVVGAGEV

SEQ ID NO: 25186 - protein, 9 aa, Homo sapiens
  AACR GENIE Results; KRAS_p.G13E; C0102
AGEVGKSAL

SEQ ID NO: 25187 - protein, 10 aa, Homo sapiens
  AACR GENIE Results; KRAS_p.G13E; A0301
VVVGAGEVGK

SEQ ID NO: 25188 - protein, 11 aa, Homo sapiens
  AACR GENIE Results; KRAS_p.G13R; A3303
EYKLVVVGAGR

SEQ ID NO: 25189 - protein, 10 aa, Homo sapiens
  AACR GENIE Results; KRAS_p.G13R; A1101
VVVGAGRVGK

SEQ ID NO: 25190 - protein, 9 aa, Homo sapiens
  AACR GENIE Results; KRAS_p.G13R; A1101
VVGAGRVGK

SEQ ID NO: 25191 - protein, 10 aa, Homo sapiens
  AACR GENIE Results; KRAS_p.G13R; A0301
VVVGAGRVGK

SEQ ID NO: 25192 - protein, 9 aa, Homo sapiens
  AACR GENIE Results; KRAS_p.G13R; B0702
AGRVGKSAL

SEQ ID NO: 25193 - protein, 11 aa, Homo sapiens
  AACR GENIE Results; KRAS_p.G13R; A3301
EYKLVVVGAGR

SEQ ID NO: 25194 - protein, 10 aa, Homo sapiens
  AACR GENIE Results; KRAS_p.G13R; A6801
VVVGAGRVGK

SEQ ID NO: 25195 - protein, 9 aa, Homo sapiens
  AACR GENIE Results; KRAS_p.G13R; A3101
KLVVVGAGR

SEQ ID NO: 25196 - protein, 9 aa, Homo sapiens
  AACR GENIE Results; KRAS_p.G13R; A0301
VVGAGRVGK

SEQ ID NO: 25197 - protein, 9 aa, Homo sapiens
  AACR GENIE Results; KRAS_p.G13R; B1302
RVGKSALTI

SEQ ID NO: 25198 - protein, 10 aa, Homo sapiens
  AACR GENIE Results; KRAS_p.G13V; A1101
VVVGAGVVGK

SEQ ID NO: 25199 - protein, 9 aa, Homo sapiens
  AACR GENIE Results; KRAS_p.G13V; A1101
VVGAGVVGK

SEQ ID NO: 25200 - protein, 10 aa, Homo sapiens
  AACR GENIE Results; KRAS_p.G13V; A0301
VVVGAGVVGK

SEQ ID NO: 25201 - protein, 9 aa, Homo sapiens
  AACR GENIE Results; KRAS_p.G13V; A0301
VVGAGVVGK

SEQ ID NO: 25202 - protein, 11 aa, Homo sapiens
  AACR GENIE Results; KRAS_p.G13V; A1101
LVVVGAGVVGK

SEQ ID NO: 25203 - protein, 9 aa, Homo sapiens
  AACR GENIE Results; KRAS_p.G13V; B0801
AGVVGKSAL

SEQ ID NO: 25204 - protein, 9 aa, Homo sapiens
  AACR GENIE Results; KRAS_p.G13V; B0702
AGVVGKSAL

SEQ ID NO: 25205 - protein, 9 aa, Homo sapiens
  AACR GENIE Results; KRAS_p.G13V; A0201
KLVVVGAGV

SEQ ID NO: 25206 - protein, 11 aa, Homo sapiens
  AACR GENIE Results; KRAS_p.G13V; A0301
LVVVGAGVVGK

SEQ ID NO: 25207 - protein, 8 aa, Homo sapiens
  AACR GENIE Results; KRAS_p.G13V; A1101
VGAGVVGK

SEQ ID NO: 25208 - protein, 11 aa, Homo sapiens
  AACR GENIE Results; KRAS_p.G13V; B0801
VGAGVVGKSAL

SEQ ID NO: 25209 - protein, 9 aa, Homo sapiens
  AACR GENIE Results; KRAS_p.G13V; B1501
AGVVGKSAL

SEQ ID NO: 25210 - protein, 8 aa, Homo sapiens
  AACR GENIE Results; KRAS_p.G13V; B0801
GVVGKSAL

SEQ ID NO: 25211 - protein, 9 aa, Homo sapiens
  AACR GENIE Results; KRAS_p.G13V; C0102
AGVVGKSAL

SEQ ID NO: 25212 - protein, 9 aa, Homo sapiens
  AACR GENIE Results; KRAS_p.K117N; C0802
NCDLPSRTV

SEQ ID NO: 25213 - protein, 9 aa, Homo sapiens
  AACR GENIE Results; KRAS_p.K117N; C0501
NCDLPSRTV

SEQ ID NO: 25214 - protein, 8 aa, Homo sapiens
  AACR GENIE Results; KRAS_p.L19F; B5101
SAFTIQLI

SEQ ID NO: 25215 - protein, 10 aa, Homo sapiens
  AACR GENIE Results; KRAS_p.L19F; B1501
GAGGVGKSAF

SEQ ID NO: 25216 - protein, 9 aa, Homo sapiens
  AACR GENIE Results; KRAS_p.L19F; B1501
AGGVGKSAF

SEQ ID NO: 25217 - protein, 9 aa, Homo sapiens
  AACR GENIE Results; KRAS_p.L19F; A2601
FTIQLIQNH

SEQ ID NO: 25218 - protein, 9 aa, Homo sapiens
  AACR GENIE Results; KRAS_p.L19F; A1101
FTIQLIQNH

SEQ ID NO: 25219 - protein, 10 aa, Homo sapiens
  AACR GENIE Results; KRAS_p.L19F; B5701
FTIQLIQNHF

SEQ ID NO: 25220 - protein, 9 aa, Homo sapiens
  AACR GENIE Results; KRAS_p.L19F; C1502
KSAFTIQLI

SEQ ID NO: 25221 - protein, 8 aa, Homo sapiens
  AACR GENIE Results; KRAS_p.L19F; C1203
SAFTIQLI

SEQ ID NO: 25222 - protein, 9 aa, Homo sapiens
  AACR GENIE Results; KRAS_p.L19F; B0702
AGGVGKSAF

SEQ ID NO: 25223 - protein, 9 aa, Homo sapiens
  AACR GENIE Results; KRAS_p.L19F; A6801
FTIQLIQNH

SEQ ID NO: 25224 - protein, 8 aa, Homo sapiens
  AACR GENIE Results; KRAS_p.Q22K; B5101
SALTIKLI

SEQ ID NO: 25225 - protein, 10 aa, Homo sapiens
  AACR GENIE Results; KRAS_p.Q22K; B5701
LTIKLIQNHF

SEQ ID NO: 25226 - protein, 9 aa, Homo sapiens
  AACR GENIE Results; KRAS_p.Q22K; B5701
KSALTIKLI

SEQ ID NO: 25227 - protein, 10 aa, Homo sapiens
  AACR GENIE Results; KRAS_p.Q22K; A0301
GVGKSALTIK

SEQ ID NO: 25228 - protein, 9 aa, Homo sapiens
  AACR GENIE Results; KRAS_p.Q22K; B5701
TIKLIQNHF

SEQ ID NO: 25229 - protein, 10 aa, Homo sapiens
  AACR GENIE Results; KRAS_p.Q61H; A0101
ILDTAGHEEY

SEQ ID NO: 25230 - protein, 10 aa, Homo sapiens
  AACR GENIE Results; KRAS_p.Q61H; C0302
ILDTAGHEEY

SEQ ID NO: 25231 - protein, 10 aa, Homo sapiens
  AACR GENIE Results; KRAS_p.Q61H; B1502
ILDTAGHEEY

SEQ ID NO: 25232 - protein, 10 aa, Homo sapiens
  AACR GENIE Results; KRAS_p.Q61H; B1501
ILDTAGHEEY

SEQ ID NO: 25233 - protein, 11 aa, Homo sapiens
  AACR GENIE Results; KRAS_p.Q61H; B3501
DILDTAGHEEY

SEQ ID NO: 25234 - protein, 10 aa, Homo sapiens
  AACR GENIE Results; KRAS_p.Q61H; B5801
ILDTAGHEEY

SEQ ID NO: 25235 - protein, 11 aa, Homo sapiens
  AACR GENIE Results; KRAS_p.Q61H; A2601
DTAGHEEYSAM

SEQ ID NO: 25236 - protein, 11 aa, Homo sapiens
  AACR GENIE Results; KRAS_p.Q61H; B1502
DILDTAGHEEY

SEQ ID NO: 25237 - protein, 10 aa, Homo sapiens
  AACR GENIE Results; KRAS_p.Q61H; B3508
ILDTAGHEEY

SEQ ID NO: 25238 - protein, 11 aa, Homo sapiens
  AACR GENIE Results; KRAS_p.Q61H; A2501
DTAGHEEYSAM

SEQ ID NO: 25239 - protein, 11 aa, Homo sapiens
  AACR GENIE Results; KRAS_p.Q61H; B2702
DILDTAGHEEY

SEQ ID NO: 25240 - protein, 11 aa, Homo sapiens
  AACR GENIE Results; KRAS_p.Q61H; A2601
DILDTAGHEEY

SEQ ID NO: 25241 - protein, 9 aa, Homo sapiens
  AACR GENIE Results; KRAS_p.Q61H; B3501
LDTAGHEEY

SEQ ID NO: 25242 - protein, 10 aa, Homo sapiens
  AACR GENIE Results; KRAS_p.Q61H; B4601
ILDTAGHEEY

SEQ ID NO: 25243 - protein, 10 aa, Homo sapiens
  AACR GENIE Results; KRAS_p.Q61H; B3901
ILDTAGHEEY

SEQ ID NO: 25244 - protein, 10 aa, Homo sapiens
  AACR GENIE Results; KRAS_p.Q61H; A2902
ILDTAGHEEY

SEQ ID NO: 25245 - protein, 11 aa, Homo sapiens
  AACR GENIE Results; KRAS_p.Q61H; B3508
DILDTAGHEEY

SEQ ID NO: 25246 - protein, 10 aa, Homo sapiens
  AACR GENIE Results; KRAS_p.Q61H; C0801
ILDTAGHEEY

SEQ ID NO: 25247 - protein, 10 aa, Homo sapiens
  AACR GENIE Results; KRAS_p.Q61H; A0207
ILDTAGHEEY

SEQ ID NO: 25248 - protein, 9 aa, Homo sapiens
  AACR GENIE Results; KRAS_p.Q61H; B1801
LDTAGHEEY

SEQ ID NO: 25249 - protein, 10 aa, Homo sapiens
  AACR GENIE Results; KRAS_p.Q61H; B3501
ILDTAGHEEY

SEQ ID NO: 25250 - protein, 11 aa, Homo sapiens
  AACR GENIE Results; KRAS_p.Q61H; A3301
DILDTAGHEEY

SEQ ID NO: 25251 - protein, 10 aa, Homo sapiens
  AACR GENIE Results; KRAS_p.Q61H; B3508
TAGHEEYSAM

SEQ ID NO: 25252 - protein, 9 aa, Homo sapiens
  AACR GENIE Results; KRAS_p.Q61H; B3508
LDTAGHEEY

SEQ ID NO: 25253 - protein, 10 aa, Homo sapiens
  AACR GENIE Results; KRAS_p.Q61H; A2901
ILDTAGHEEY

SEQ ID NO: 25254 - protein, 8 aa, Homo sapiens
  AACR GENIE Results; KRAS_p.Q61H; A2601
DTAGHEEY

SEQ ID NO: 25255 - protein, 9 aa, Homo sapiens
  AACR GENIE Results; KRAS_p.Q61H; B2702
LDTAGHEEY

SEQ ID NO: 25256 - protein, 9 aa, Homo sapiens
  AACR GENIE Results; KRAS_p.Q61H; C0801
AGHEEYSAM

SEQ ID NO: 25257 - protein, 9 aa, Homo sapiens
  AACR GENIE Results; KRAS_p.Q61H; A0101
LDTAGHEEY

SEQ ID NO: 25258 - protein, 9 aa, Homo sapiens
  AACR GENIE Results; KRAS_p.Q61H; B3502
AGHEEYSAM

SEQ ID NO: 25259 - protein, 10 aa, Homo sapiens
  AACR GENIE Results; KRAS_p.Q61H; C0802
ILDTAGHEEY

SEQ ID NO: 25260 - protein, 10 aa, Homo sapiens
  AACR GENIE Results; KRAS_p.Q61H; A3002
ILDTAGHEEY

SEQ ID NO: 25261 - protein, 10 aa, Homo sapiens
  AACR GENIE Results; KRAS_p.Q61H; B2702
ILDTAGHEEY

SEQ ID NO: 25262 - protein, 11 aa, Homo sapiens
  AACR GENIE Results; KRAS_p.Q61H; A2902
DILDTAGHEEY

SEQ ID NO: 25263 - protein, 9 aa, Homo sapiens
  AACR GENIE Results; KRAS_p.Q61H; B1501
LDTAGHEEY

SEQ ID NO: 25264 - protein, 10 aa, Homo sapiens
  AACR GENIE Results; KRAS_p.Q61H; B1301
ILDTAGHEEY

SEQ ID NO: 25265 - protein, 9 aa, Homo sapiens
  AACR GENIE Results; KRAS_p.Q61H; B5401
TAGHEEYSA

SEQ ID NO: 25266 - protein, 11 aa, Homo sapiens
  AACR GENIE Results; KRAS_p.Q61H; A2901
DILDTAGHEEY

SEQ ID NO: 25267 - protein, 11 aa, Homo sapiens
  AACR GENIE Results; KRAS_p.Q61H; B1501
DILDTAGHEEY

SEQ ID NO: 25268 - protein, 11 aa, Homo sapiens
  AACR GENIE Results; KRAS_p.Q61H; A6801
DILDTAGHEEY

SEQ ID NO: 25269 - protein, 11 aa, Homo sapiens
  AACR GENIE Results; KRAS_p.Q61H; C0801
DILDTAGHEEY

SEQ ID NO: 25270 - protein, 10 aa, Homo sapiens
  AACR GENIE Results; KRAS_p.Q61K; A0101
ILDTAGKEEY

SEQ ID NO: 25271 - protein, 10 aa, Homo sapiens
  AACR GENIE Results; KRAS_p.Q61K; B1501
ILDTAGKEEY

SEQ ID NO: 25272 - protein, 10 aa, Homo sapiens
  AACR GENIE Results; KRAS_p.Q61K; B5801
ILDTAGKEEY

SEQ ID NO: 25273 - protein, 11 aa, Homo sapiens
  AACR GENIE Results; KRAS_p.Q61K; A2601
DTAGKEEYSAM

SEQ ID NO: 25274 - protein, 11 aa, Homo sapiens
  AACR GENIE Results; KRAS_p.Q61K; B3501
DILDTAGKEEY

SEQ ID NO: 25275 - protein, 10 aa, Homo sapiens
  AACR GENIE Results; KRAS_p.Q61K; B3901
ILDTAGKEEY

SEQ ID NO: 25276 - protein, 9 aa, Homo sapiens
  AACR GENIE Results; KRAS_p.Q61K; B2702
LDILDTAGK

SEQ ID NO: 25277 - protein, 11 aa, Homo sapiens
  AACR GENIE Results; KRAS_p.Q61K; A2601
DILDTAGKEEY

SEQ ID NO: 25278 - protein, 10 aa, Homo sapiens
  AACR GENIE Results; KRAS_p.Q61K; B3501
ILDTAGKEEY

SEQ ID NO: 25279 - protein, 9 aa, Homo sapiens
  AACR GENIE Results; KRAS_p.Q61K; B3501
LDTAGKEEY

SEQ ID NO: 25280 - protein, 10 aa, Homo sapiens
  AACR GENIE Results; KRAS_p.Q61K; B3501
TAGKEEYSAM

SEQ ID NO: 25281 - protein, 11 aa, Homo sapiens
  AACR GENIE Results; KRAS_p.Q61K; B2702
DILDTAGKEEY

SEQ ID NO: 25282 - protein, 10 aa, Homo sapiens
  AACR GENIE Results; KRAS_p.Q61K; A2902
ILDTAGKEEY

SEQ ID NO: 25283 - protein, 10 aa, Homo sapiens
  AACR GENIE Results; KRAS_p.Q61K; B3503
TAGKEEYSAM

SEQ ID NO: 25284 - protein, 10 aa, Homo sapiens
  AACR GENIE Results; KRAS_p.Q61K; B2702
LLDILDTAGK

SEQ ID NO: 25285 - protein, 9 aa, Homo sapiens
  AACR GENIE Results; KRAS_p.Q61K; B1501
AGKEEYSAM

SEQ ID NO: 25286 - protein, 10 aa, Homo sapiens
  AACR GENIE Results; KRAS_p.Q61K; A3002
ILDTAGKEEY

SEQ ID NO: 25287 - protein, 10 aa, Homo sapiens
  AACR GENIE Results; KRAS_p.Q61K; B3502
TAGKEEYSAM

SEQ ID NO: 25288 - protein, 10 aa, Homo sapiens
  AACR GENIE Results; KRAS_p.Q61L; A0101
ILDTAGLEEY

SEQ ID NO: 25289 - protein, 10 aa, Homo sapiens
  AACR GENIE Results; KRAS_p.Q61L; C0302
ILDTAGLEEY

SEQ ID NO: 25290 - protein, 11 aa, Homo sapiens
  AACR GENIE Results; KRAS_p.Q61L; A2601
DTAGLEEYSAM

SEQ ID NO: 25291 - protein, 10 aa, Homo sapiens
  AACR GENIE Results; KRAS_p.Q61L; B5801
ILDTAGLEEY

SEQ ID NO: 25292 - protein, 11 aa, Homo sapiens
  AACR GENIE Results; KRAS_p.Q61L; B3501
DILDTAGLEEY

SEQ ID NO: 25293 - protein, 10 aa, Homo sapiens
  AACR GENIE Results; KRAS_p.Q61L; B1501
ILDTAGLEEY

SEQ ID NO: 25294 - protein, 11 aa, Homo sapiens
  AACR GENIE Results; KRAS_p.Q61L; A2601
DILDTAGLEEY

SEQ ID NO: 25295 - protein, 10 aa, Homo sapiens
  AACR GENIE Results; KRAS_p.Q61L; A6802
DTAGLEEYSA

SEQ ID NO: 25296 - protein, 9 aa, Homo sapiens
  AACR GENIE Results; KRAS_p.Q61L; B3501
LDTAGLEEY

SEQ ID NO: 25297 - protein, 10 aa, Homo sapiens
  AACR GENIE Results; KRAS_p.Q61L; B3901
ILDTAGLEEY

SEQ ID NO: 25298 - protein, 8 aa, Homo sapiens
  AACR GENIE Results; KRAS_p.Q61L; A2601
DTAGLEEY

SEQ ID NO: 25299 - protein, 11 aa, Homo sapiens
  AACR GENIE Results; KRAS_p.Q61L; B2702
DILDTAGLEEY

SEQ ID NO: 25300 - protein, 9 aa, Homo sapiens
  AACR GENIE Results; KRAS_p.Q61L; C0801
AGLEEYSAM

SEQ ID NO: 25301 - protein, 10 aa, Homo sapiens
  AACR GENIE Results; KRAS_p.Q61L; B3501
ILDTAGLEEY

SEQ ID NO: 25302 - protein, 10 aa, Homo sapiens
  AACR GENIE Results; KRAS_p.Q61L; B3501
TAGLEEYSAM

SEQ ID NO: 25303 - protein, 11 aa, Homo sapiens
  AACR GENIE Results; KRAS_p.Q61L; A3301
DILDTAGLEEY

SEQ ID NO: 25304 - protein, 9 aa, Homo sapiens
  AACR GENIE Results; KRAS_p.Q61L; B1801
LDTAGLEEY

SEQ ID NO: 25305 - protein, 10 aa, Homo sapiens
  AACR GENIE Results; KRAS_p.Q61L; A2902
ILDTAGLEEY

SEQ ID NO: 25306 - protein, 10 aa, Homo sapiens
  AACR GENIE Results; KRAS_p.Q61L; B3503
TAGLEEYSAM

SEQ ID NO: 25307 - protein, 10 aa, Homo sapiens
  AACR GENIE Results; KRAS_p.Q61L; B2702
ILDTAGLEEY

SEQ ID NO: 25308 - protein, 11 aa, Homo sapiens
  AACR GENIE Results; KRAS_p.Q61L; B1501
DILDTAGLEEY

SEQ ID NO: 25309 - protein, 10 aa, Homo sapiens
  AACR GENIE Results; KRAS_p.Q61L; A0201
ILDTAGLEEY

SEQ ID NO: 25310 - protein, 9 aa, Homo sapiens
  AACR GENIE Results; KRAS_p.Q61L; B4002
LDILDTAGL

SEQ ID NO: 25311 - protein, 10 aa, Homo sapiens
  AACR GENIE Results; KRAS_p.Q61R; A0101
ILDTAGREEY

SEQ ID NO: 25312 - protein, 10 aa, Homo sapiens
  AACR GENIE Results; KRAS_p.Q61R; C0302
ILDTAGREEY

SEQ ID NO: 25313 - protein, 10 aa, Homo sapiens
  AACR GENIE Results; KRAS_p.Q61R; B3508
TAGREEYSAM

SEQ ID NO: 25314 - protein, 10 aa, Homo sapiens
  AACR GENIE Results; KRAS_p.Q61R; B1501
ILDTAGREEY

SEQ ID NO: 25315 - protein, 10 aa, Homo sapiens
  AACR GENIE Results; KRAS_p.Q61R; B1502
ILDTAGREEY

SEQ ID NO: 25316 - protein, 10 aa, Homo sapiens
  AACR GENIE Results; KRAS_p.Q61R; B5801
ILDTAGREEY

SEQ ID NO: 25317 - protein, 11 aa, Homo sapiens
  AACR GENIE Results; KRAS_p.Q61R; B3501
DILDTAGREEY

SEQ ID NO: 25318 - protein, 11 aa, Homo sapiens
  AACR GENIE Results; KRAS_p.Q61R; A2601
DILDTAGREEY

SEQ ID NO: 25319 - protein, 11 aa, Homo sapiens
  AACR GENIE Results; KRAS_p.Q61R; A2601
DTAGREEYSAM

SEQ ID NO: 25320 - protein, 11 aa, Homo sapiens
  AACR GENIE Results; KRAS_p.Q61R; B1502
DILDTAGREEY

SEQ ID NO: 25321 - protein, 10 aa, Homo sapiens
  AACR GENIE Results; KRAS_p.Q61R; B2702
ILDTAGREEY

SEQ ID NO: 25322 - protein, 10 aa, Homo sapiens
  AACR GENIE Results; KRAS_p.Q61R; B4601
ILDTAGREEY

SEQ ID NO: 25323 - protein, 10 aa, Homo sapiens
  AACR GENIE Results; KRAS_p.Q61R; B3901
ILDTAGREEY

SEQ ID NO: 25324 - protein, 10 aa, Homo sapiens
  AACR GENIE Results; KRAS_p.Q61R; B3508
ILDTAGREEY

SEQ ID NO: 25325 - protein, 11 aa, Homo sapiens
  AACR GENIE Results; KRAS_p.Q61R; B3508
DILDTAGREEY

SEQ ID NO: 25326 - protein, 10 aa, Homo sapiens
  AACR GENIE Results; KRAS_p.Q61R; A2902
ILDTAGREEY

SEQ ID NO: 25327 - protein, 9 aa, Homo sapiens
  AACR GENIE Results; KRAS_p.Q61R; B2702
LDILDTAGR

SEQ ID NO: 25328 - protein, 11 aa, Homo sapiens
  AACR GENIE Results; KRAS_p.Q61R; A2501
DTAGREEYSAM

SEQ ID NO: 25329 - protein, 10 aa, Homo sapiens
  AACR GENIE Results; KRAS_p.Q61R; A3002
ILDTAGREEY

SEQ ID NO: 25330 - protein, 9 aa, Homo sapiens
  AACR GENIE Results; KRAS_p.Q61R; B2705
GREEYSAMR

SEQ ID NO: 25331 - protein, 11 aa, Homo sapiens
  AACR GENIE Results; KRAS_p.Q61R; B2702
DILDTAGREEY

SEQ ID NO: 25332 - protein, 9 aa, Homo sapiens
  AACR GENIE Results; KRAS_p.Q61R; B3508
LDTAGREEY

SEQ ID NO: 25333 - protein, 9 aa, Homo sapiens
  AACR GENIE Results; KRAS_p.Q61R; B3501
LDTAGREEY

SEQ ID NO: 25334 - protein, 10 aa, Homo sapiens
  AACR GENIE Results; KRAS_p.Q61R; B3501
ILDTAGREEY

SEQ ID NO: 25335 - protein, 11 aa, Homo sapiens
  AACR GENIE Results; KRAS_p.Q61R; B1801
DILDTAGREEY

SEQ ID NO: 25336 - protein, 10 aa, Homo sapiens
  AACR GENIE Results; KRAS_p.Q61R; B3501
TAGREEYSAM

SEQ ID NO: 25337 - protein, 11 aa, Homo sapiens
  AACR GENIE Results; KRAS_p.Q61R; B1501
DILDTAGREEY

SEQ ID NO: 25338 - protein, 10 aa, Homo sapiens
  AACR GENIE Results; KRAS_p.Q61R; B5701
ILDTAGREEY

SEQ ID NO: 25339 - protein, 11 aa, Homo sapiens
  AACR GENIE Results; KRAS_p.Q61R; A2501
DILDTAGREEY

SEQ ID NO: 25340 - protein, 10 aa, Homo sapiens
  AACR GENIE Results; KRAS_p.Q61R; A0207
ILDTAGREEY

SEQ ID NO: 25341 - protein, 10 aa, Homo sapiens
  AACR GENIE Results; KRAS_p.Q61R; B3503
TAGREEYSAM

SEQ ID NO: 25342 - protein, 10 aa, Homo sapiens
  AACR GENIE Results; KRAS_p.Q61R; B3502
TAGREEYSAM

SEQ ID NO: 25343 - protein, 10 aa, Homo sapiens
  AACR GENIE Results; KRAS_p.Q61R; C0801
ILDTAGREEY

SEQ ID NO: 25344 - protein, 10 aa, Homo sapiens
  AACR GENIE Results; KRAS_p.V14I; A1101
VVVGAGGIGK

SEQ ID NO: 25345 - protein, 9 aa, Homo sapiens
  AACR GENIE Results; KRAS_p.V14I; A1101
VVGAGGIGK

SEQ ID NO: 25346 - protein, 10 aa, Homo sapiens
  AACR GENIE Results; KRAS_p.V14I; A6801
VVVGAGGIGK

SEQ ID NO: 25347 - protein, 9 aa, Homo sapiens
  AACR GENIE Results; KRAS_p.V14I; A0301
VVGAGGIGK

SEQ ID NO: 25348 - protein, 10 aa, Homo sapiens
  AACR GENIE Results; KRAS_p.V14I; A0301
VVVGAGGIGK

SEQ ID NO: 25349 - protein, 9 aa, Homo sapiens
  AACR GENIE Results; KRAS_p.V14I; B1302
GIGKSALTI

SEQ ID NO: 25350 - protein, 11 aa, Homo sapiens
  AACR GENIE Results; KRAS_p.V14I; B0801
VGAGGIGKSAL

SEQ ID NO: 25351 - protein, 9 aa, Homo sapiens
  AACR GENIE Results; KRAS_p.V14I; B0702
AGGIGKSAL

SEQ ID NO: 25352 - protein, 11 aa, Homo sapiens
  AACR GENIE Results; KRAS_p.V14I; C0704
VVVGAGGIGKS

SEQ ID NO: 25353 - protein, 8 aa, Homo sapiens
  AACR GENIE Results; KRAS_p.V14I; B5101
IGKSALTI

SEQ ID NO: 25354 - protein, 10 aa, Homo sapiens
  AACR GENIE Results; KRAS_p.V14I; A3001
VVVGAGGIGK

SEQ ID NO: 25355 - protein, 8 aa, Homo sapiens
  AACR GENIE Results; KRAS_p.V14I; B0801
GGIGKSAL

SEQ ID NO: 25356 - protein, 10 aa, Homo sapiens
  AACR GENIE Results; KRAS_p.V14I; B1302
GGIGKSALTI

SEQ ID NO: 25357 - protein, 10 aa, Homo sapiens
  AACR GENIE Results; KRAS_p.V14I; B2702
VVVGAGGIGK

SEQ ID NO: 25358 - protein, 11 aa, Homo sapiens
  AACR GENIE Results; KRAS_p.V14I; A1101
VVVGAGGIGKS

SEQ ID NO: 25359 - protein, 11 aa, Homo sapiens
  AACR GENIE Results; KRAS_p.V14I; B2702
LVVVGAGGIGK

SEQ ID NO: 25360 - protein, 11 aa, Homo sapiens
  AACR GENIE Results; KRAS_p.V14I; A6801
VVVGAGGIGKS

SEQ ID NO: 25361 - protein, 11 aa, Homo sapiens
  AACR GENIE Results; KRAS_p.V14I; A2601
VVVGAGGIGKS

SEQ ID NO: 25362 - protein, 9 aa, Homo sapiens
  AACR GENIE Results; KRAS_p.V14I; A6801
VVGAGGIGK

SEQ ID NO: 25363 - protein, 11 aa, Homo sapiens
  AACR GENIE Results; KRAS_p.V14I; A0301
LVVVGAGGIGK

SEQ ID NO: 25364 - protein, 11 aa, Homo sapiens
  AACR GENIE Results; KRAS_p.V14I; A1101
LVVVGAGGIGK

SEQ ID NO: 25365 - protein, 11 aa, Homo sapiens
  AACR GENIE Results; KRAS_p.V14I; A3101
VVVGAGGIGKS

SEQ ID NO: 25366 - protein, 9 aa, Homo sapiens
  AACR GENIE Results; LMO2_p.E145K; A1101
LINSDIVCK

SEQ ID NO: 25367 - protein, 10 aa, Homo sapiens
  AACR GENIE Results; LMO2_p.E145K; B5701
IVCKQDIYEW

SEQ ID NO: 25368 - protein, 9 aa, Homo sapiens
  AACR GENIE Results; LMO2_p.E145K; A0301
LINSDIVCK

SEQ ID NO: 25369 - protein, 8 aa, Homo sapiens
  AACR GENIE Results; LMO2_p.E145K; A1101
INSDIVCK

SEQ ID NO: 25370 - protein, 10 aa, Homo sapiens
  AACR GENIE Results; MAP2K1_p.C121S; A2601
ESNSPYIVGF

SEQ ID NO: 25371 - protein, 9 aa, Homo sapiens
  AACR GENIE Results; MAP2K1_p.C121S; B1501
VLHESNSPY

SEQ ID NO: 25372 - protein, 9 aa, Homo sapiens
  AACR GENIE Results; MAP2K1_p.D67N; B1402
DNFEKISEL

SEQ ID NO: 25373 - protein, 9 aa, Homo sapiens
  AACR GENIE Results; MAP2K1_p.D67N; B0801
DNFEKISEL

SEQ ID NO: 25374 - protein, 8 aa, Homo sapiens
  AACR GENIE Results; MAP2K1_p.G128D; B3501
SPYIVDFY

SEQ ID NO: 25375 - protein, 9 aa, Homo sapiens
  AACR GENIE Results; MAP2K1_p.G128D; A2902
NSPYIVDFY

SEQ ID NO: 25376 - protein, 9 aa, Homo sapiens
  AACR GENIE Results; MAP2K1_p.G128D; A0101
NSPYIVDFY

SEQ ID NO: 25377 - protein, 10 aa, Homo sapiens
  AACR GENIE Results; MAP2K1_p.G128D; A2902
YIVDFYGAFY

SEQ ID NO: 25378 - protein, 8 aa, Homo sapiens
  AACR GENIE Results; MAP2K1_p.G128D; B1801
SPYIVDFY

SEQ ID NO: 25379 - protein, 9 aa, Homo sapiens
  AACR GENIE Results; MAP2K1_p.K57E; A6801
EAFLTQEQK

SEQ ID NO: 25380 - protein, 9 aa, Homo sapiens
  AACR GENIE Results; MAP2K1_p.K57E; B2702
EAFLTQEQK

SEQ ID NO: 25381 - protein, 10 aa, Homo sapiens
  AACR GENIE Results; MAP2K1_p.K57E; B2702
LEAFLTQEQK

SEQ ID NO: 25382 - protein, 9 aa, Homo sapiens
  AACR GENIE Results; MAP2K1_p.K57E; C0802
TQEQKVGEL

SEQ ID NO: 25383 - protein, 10 aa, Homo sapiens
  AACR GENIE Results; MAP2K1_p.K57E; A6801
EAFLTQEQKV

SEQ ID NO: 25384 - protein, 10 aa, Homo sapiens
  AACR GENIE Results; MAP2K1_p.K57E; B5101
EAFLTQEQKV

SEQ ID NO: 25385 - protein, 8 aa, Homo sapiens
  AACR GENIE Results; MAP2K1_p.K57E; B1302
FLTQEQKV

SEQ ID NO: 25386 - protein, 8 aa, Homo sapiens
  AACR GENIE Results; MAP2K1_p.K57E; B4001
QEQKVGEL

SEQ ID NO: 25387 - protein, 9 aa, Homo sapiens
  AACR GENIE Results; MAP2K1_p.K57N; A6801
EAFLTQNQK

SEQ ID NO: 25388 - protein, 9 aa, Homo sapiens
  AACR GENIE Results; MAP2K1_p.K57N; B1501
TQNQKVGEL

SEQ ID NO: 25389 - protein, 10 aa, Homo sapiens
  AACR GENIE Results; MAP2K1_p.K57N; A6801
EAFLTQNQKV

SEQ ID NO: 25390 - protein, 9 aa, Homo sapiens
  AACR GENIE Results; MAP2K1_p.K57N; B0801
TQNQKVGEL

SEQ ID NO: 25391 - protein, 10 aa, Homo sapiens
  AACR GENIE Results; MAP2K1_p.K57N; A1101
TQNQKVGELK

SEQ ID NO: 25392 - protein, 10 aa, Homo sapiens
  AACR GENIE Results; MAP2K1_p.K57N; B5101
EAFLTQNQKV

SEQ ID NO: 25393 - protein, 10 aa, Homo sapiens
  AACR GENIE Results; MAP2K1_p.K57N; B2702
LEAFLTQNQK

SEQ ID NO: 25394 - protein, 8 aa, Homo sapiens
  AACR GENIE Results; MAP2K1_p.K57N; B1302
FLTQNQKV

SEQ ID NO: 25395 - protein, 9 aa, Homo sapiens
  AACR GENIE Results; MAP2K1_p.K57N; B1402
TQNQKVGEL

SEQ ID NO: 25396 - protein, 9 aa, Homo sapiens
  AACR GENIE Results; MAP2K1_p.K57N; A1101
EAFLTQNQK

SEQ ID NO: 25397 - protein, 9 aa, Homo sapiens
  AACR GENIE Results; MAP2K1_p.K57N; B2702
EAFLTQNQK

SEQ ID NO: 25398 - protein, 11 aa, Homo sapiens
  AACR GENIE Results; MAP2K1_p.K57N; B4901
LEAFLTQNQKV

SEQ ID NO: 25399 - protein, 9 aa, Homo sapiens
  AACR GENIE Results; MAP2K1_p.Q56P; B0702
TPKQKVGEL

SEQ ID NO: 25400 - protein, 9 aa, Homo sapiens
  AACR GENIE Results; MAP2K1_p.Q56P; B0801
TPKQKVGEL

SEQ ID NO: 25401 - protein, 10 aa, Homo sapiens
  AACR GENIE Results; MAP2K1_p.Q56P; B5101
EAFLTPKQKV

SEQ ID NO: 25402 - protein, 9 aa, Homo sapiens
  AACR GENIE Results; MAP2K1_p.Q56P; A0301
RLEAFLTPK

SEQ ID NO: 25403 - protein, 11 aa, Homo sapiens
  AACR GENIE Results; MAP2K2_p.E288del; C0802
VVDGEGEPHSI

SEQ ID NO: 25404 - protein, 8 aa, Homo sapiens
  AACR GENIE Results; MAP2K2_p.E288del; B4403
GEGEPHSI

SEQ ID NO: 25405 - protein, 9 aa, Homo sapiens
  AACR GENIE Results; MAP2K4_p.P326L; B1501
VVKGDPLQL

SEQ ID NO: 25406 - protein, 9 aa, Homo sapiens
  AACR GENIE Results; MAP2K4_p.P326L; B0801
VVKGDPLQL

SEQ ID NO: 25407 - protein, 9 aa, Homo sapiens
  AACR GENIE Results; MAX_p.R60Q; A1101
ASQAQILDK

SEQ ID NO: 25408 - protein, 11 aa, Homo sapiens
  AACR GENIE Results; MAX_p.R60Q; B3501
QAQILDKATEY

SEQ ID NO: 25409 - protein, 8 aa, Homo sapiens
  AACR GENIE Results; MAX_p.R60Q; A1101
SQAQILDK

SEQ ID NO: 25410 - protein, 10 aa, Homo sapiens
  AACR GENIE Results; MAX_p.R60Q; A1101
KASQAQILDK

SEQ ID NO: 25411 - protein, 10 aa, Homo sapiens
  AACR GENIE Results; MAX_p.R60Q; A0301
KASQAQILDK

SEQ ID NO: 25412 - protein, 11 aa, Homo sapiens
  AACR GENIE Results; MCL1_p.G49R; B4001
REIRGGEAGAV

SEQ ID NO: 25413 - protein, 9 aa, Homo sapiens
  AACR GENIE Results; MDM4_p.S367L; A0301
ILAPVVRPK

SEQ ID NO: 25414 - protein, 9 aa, Homo sapiens
  AACR GENIE Results; MDM4_p.S367L; A3101
RTILAPVVR

SEQ ID NO: 25415 - protein, 9 aa, Homo sapiens
  AACR GENIE Results; MDM4_p.S367L; A1101
ILAPVVRPK

SEQ ID NO: 25416 - protein, 10 aa, Homo sapiens
  AACR GENIE Results; MDM4_p.S367L; A0301
TILAPVVRPK

SEQ ID NO: 25417 - protein, 8 aa, Homo sapiens
  AACR GENIE Results; MDM4_p.S367L; A3101
TILAPVVR

SEQ ID NO: 25418 - protein, 11 aa, Homo sapiens
  AACR GENIE Results; MDM4_p.S367L; A0301
RTILAPVVRPK

SEQ ID NO: 25419 - protein, 9 aa, Homo sapiens
  AACR GENIE Results; MDM4_p.S367L; B5701
RTILAPVVR

SEQ ID NO: 25420 - protein, 10 aa, Homo sapiens
  AACR GENIE Results; MDM4_p.S367L; A1101
TILAPVVRPK

SEQ ID NO: 25421 - protein, 11 aa, Homo sapiens
  AACR GENIE Results; MDM4_p.S367L; A1101
RTILAPVVRPK

SEQ ID NO: 25422 - protein, 9 aa, Homo sapiens
  AACR GENIE Results; MDM4_p.S367L; B0702
VPDCRRTIL

SEQ ID NO: 25423 - protein, 11 aa, Homo sapiens
  AACR GENIE Results; MED12_p.A831V; B3501
FPTAEDIFVKF

SEQ ID NO: 25424 - protein, 9 aa, Homo sapiens
  AACR GENIE Results; MED12_p.A831V; B3501
TAEDIFVKF

SEQ ID NO: 25425 - protein, 9 aa, Homo sapiens
  AACR GENIE Results; MED12_p.A831V; C0501
TAEDIFVKF

SEQ ID NO: 25426 - protein, 9 aa, Homo sapiens
  AACR GENIE Results; MED12_p.A831V; C0202
TAEDIFVKF

SEQ ID NO: 25427 - protein, 9 aa, Homo sapiens
  AACR GENIE Results; MET_p.A48T; B4901
TETPIQNVI

SEQ ID NO: 25428 - protein, 8 aa, Homo sapiens
  AACR GENIE Results; MET_p.A48T; B4901
TETPIQNV

SEQ ID NO: 25429 - protein, 10 aa, Homo sapiens
  AACR GENIE Results; MET_p.A48T; B4001
TETPIQNVIL

SEQ ID NO: 25430 - protein, 9 aa, Homo sapiens
  AACR GENIE Results; MET_p.A48T; B4001
TETPIQNVI

SEQ ID NO: 25431 - protein, 9 aa, Homo sapiens
  AACR GENIE Results; MET_p.A48T; B4403
TETPIQNVI

SEQ ID NO: 25432 - protein, 9 aa, Homo sapiens
  AACR GENIE Results; MET_p.A48T; A3001
TETPIQNVI

SEQ ID NO: 25433 - protein, 9 aa, Homo sapiens
  AACR GENIE Results; MET_p.L14F; B1501
VLAPGILVF

SEQ ID NO: 25434 - protein, 9 aa, Homo sapiens
  AACR GENIE Results; MET_p.L14F; C1701
LAPGILVFL

SEQ ID NO: 25435 - protein, 10 aa, Homo sapiens
  AACR GENIE Results; MET_p.L14F; C1701
VLAPGILVFL

SEQ ID NO: 25436 - protein, 10 aa, Homo sapiens
  AACR GENIE Results; MET_p.L14F; A0201
VLAPGILVFL

SEQ ID NO: 25437 - protein, 11 aa, Homo sapiens
  AACR GENIE Results; MET_p.V504F; A0301
TLFITGKKITK

SEQ ID NO: 25438 - protein, 9 aa, Homo sapiens
  AACR GENIE Results; MET_p.V504F; A1101
GYTLFITGK

SEQ ID NO: 25439 - protein, 9 aa, Homo sapiens
  AACR GENIE Results; MPL_p.R357Q; B1302
SQNDSIIHI

SEQ ID NO: 25440 - protein, 9 aa, Homo sapiens
  AACR GENIE Results; MPL_p.R357Q; B3801
SQNDSIIHI

SEQ ID NO: 25441 - protein, 11 aa, Homo sapiens
  AACR GENIE Results; MPL_p.R357Q; B5701
KSQNDSIIHIL

SEQ ID NO: 25442 - protein, 10 aa, Homo sapiens
  AACR GENIE Results; MPL_p.R357Q; B3801
SQNDSIIHIL

SEQ ID NO: 25443 - protein, 9 aa, Homo sapiens
  AACR GENIE Results; MSH2_p.R406Q; A0205
QLYQGINQL

SEQ ID NO: 25444 - protein, 9 aa, Homo sapiens
  AACR GENIE Results; MSH2_p.R406Q; A0201
QLYQGINQL

SEQ ID NO: 25445 - protein, 9 aa, Homo sapiens
  AACR GENIE Results; MSH2_p.R406Q; B1302
QLYQGINQL

SEQ ID NO: 25446 - protein, 9 aa, Homo sapiens
  AACR GENIE Results; MSH2_p.R406Q; B5001
QLYQGINQL

SEQ ID NO: 25447 - protein, 9 aa, Homo sapiens
  AACR GENIE Results; MSH2_p.R406Q; B3901
QLYQGINQL

SEQ ID NO: 25448 - protein, 9 aa, Homo sapiens
  AACR GENIE Results; MSH2_p.R406Q; B3801
QLYQGINQL

SEQ ID NO: 25449 - protein, 9 aa, Homo sapiens
  AACR GENIE Results; MSH2_p.R406Q; B1501
QLYQGINQL

SEQ ID NO: 25450 - protein, 9 aa, Homo sapiens
  AACR GENIE Results; MSH2_p.R406Q; B5101
DCYQLYQGI

SEQ ID NO: 25451 - protein, 9 aa, Homo sapiens
  AACR GENIE Results; MSH2_p.R406Q; B0801
QLYQGINQL

SEQ ID NO: 25452 - protein, 9 aa, Homo sapiens
  AACR GENIE Results; MSH2_p.R406Q; A0301
QLYQGINQL

SEQ ID NO: 25453 - protein, 9 aa, Homo sapiens
  AACR GENIE Results; MSH2_p.R406Q; A3001
QLYQGINQL

SEQ ID NO: 25454 - protein, 9 aa, Homo sapiens
  AACR GENIE Results; MSH6_p.E807K; B5101
VPDKISKVV

SEQ ID NO: 25455 - protein, 8 aa, Homo sapiens
  AACR GENIE Results; MSH6_p.E807K; B5101
VPDKISKV

SEQ ID NO: 25456 - protein, 10 aa, Homo sapiens
  AACR GENIE Results; MSH6_p.E807K; A0301
KISKVVELLK

SEQ ID NO: 25457 - protein, 9 aa, Homo sapiens
  AACR GENIE Results; MSH6_p.E807K; A2601
VVPDKISKV

SEQ ID NO: 25458 - protein, 9 aa, Homo sapiens
  AACR GENIE Results; MSH6_p.E807K; B0801
DKISKVVEL

SEQ ID NO: 25459 - protein, 9 aa, Homo sapiens
  AACR GENIE Results; MSH6_p.E807K; B1402
DKISKVVEL

SEQ ID NO: 25460 - protein, 9 aa, Homo sapiens
  AACR GENIE Results; MSH6_p.E807K; A0201
VVPDKISKV

SEQ ID NO: 25461 - protein, 9 aa, Homo sapiens
  AACR GENIE Results; MSH6_p.E807K; A6801
MVVPDKISK

SEQ ID NO: 25462 - protein, 9 aa, Homo sapiens
  AACR GENIE Results; MSH6_p.E807K; A1101
MVVPDKISK

SEQ ID NO: 25463 - protein, 11 aa, Homo sapiens
  AACR GENIE Results; MSH6_p.E807K; B0702
VPDKISKVVEL

SEQ ID NO: 25464 - protein, 9 aa, Homo sapiens
  AACR GENIE Results; MSH6_p.E807K; B0702
VPDKISKVV

SEQ ID NO: 25465 - protein, 8 aa, Homo sapiens
  AACR GENIE Results; MSH6_p.E807K; B5701
ISKVVELL

SEQ ID NO: 25466 - protein, 10 aa, Homo sapiens
  AACR GENIE Results; MSH6_p.E807K; A2601
MVVPDKISKV

SEQ ID NO: 25467 - protein, 9 aa, Homo sapiens
  AACR GENIE Results; MSH6_p.E807K; B3501
MVVPDKISK

SEQ ID NO: 25468 - protein, 9 aa, Homo sapiens
  AACR GENIE Results; MSH6_p.E807K; B5701
ISKVVELLK

SEQ ID NO: 25469 - protein, 9 aa, Homo sapiens
  AACR GENIE Results; MSH6_p.R1095H; A1101
GSHHPCITK

SEQ ID NO: 25470 - protein, 9 aa, Homo sapiens
  AACR GENIE Results; MSH6_p.R1095H; A0301
GSHHPCITK

SEQ ID NO: 25471 - protein, 9 aa, Homo sapiens
  AACR GENIE Results; MSH6_p.R1334W; A6802
QSLRLFWEV

SEQ ID NO: 25472 - protein, 8 aa, Homo sapiens
  AACR GENIE Results; MSH6_p.V1160I; B5101
IPAEVCRL

SEQ ID NO: 25473 - protein, 8 aa, Homo sapiens
  AACR GENIE Results; MSH6_p.V1160I; B0702
IPAEVCRL

SEQ ID NO: 25474 - protein, 10 aa, Homo sapiens
  AACR GENIE Results; MSH6_p.V1160I; A2402
CYIPAEVCRL

SEQ ID NO: 25475 - protein, 9 aa, Homo sapiens
  AACR GENIE Results; MTOR_p.A2420V; B3501
MAVLEVFVY

SEQ ID NO: 25476 - protein, 9 aa, Homo sapiens
  AACR GENIE Results; MTOR_p.A2420V; B1501
SVMAVLEVF

SEQ ID NO: 25477 - protein, 9 aa, Homo sapiens
  AACR GENIE Results; MTOR_p.A2420V; B5101
DSVMAVLEV

SEQ ID NO: 25478 - protein, 9 aa, Homo sapiens
  AACR GENIE Results; MTOR_p.A2420V; B3501
SVMAVLEVF

SEQ ID NO: 25479 - protein, 10 aa, Homo sapiens
  AACR GENIE Results; MTOR_p.A2420V; A2402
VFVYDPLLNW

SEQ ID NO: 25480 - protein, 9 aa, Homo sapiens
  AACR GENIE Results; MTOR_p.A2420V; A0201
VMAVLEVFV

SEQ ID NO: 25481 - protein, 8 aa, Homo sapiens
  AACR GENIE Results; MTOR_p.A2420V; B1501
AVLEVFVY

SEQ ID NO: 25482 - protein, 9 aa, Homo sapiens
  AACR GENIE Results; MTOR_p.E1799K; A2902
MNFKAVLHY

SEQ ID NO: 25483 - protein, 8 aa, Homo sapiens
  AACR GENIE Results; MTOR_p.E1799K; B0801
VMNFKAVL

SEQ ID NO: 25484 - protein, 11 aa, Homo sapiens
  AACR GENIE Results; MTOR_p.E1799K; A2902
AVMNFKAVLHY

SEQ ID NO: 25485 - protein, 9 aa, Homo sapiens
  AACR GENIE Results; MTOR_p.E1799K; B0702
AVMNFKAVL

SEQ ID NO: 25486 - protein, 9 aa, Homo sapiens
  AACR GENIE Results; MTOR_p.E1799K; B1501
AVMNFKAVL

SEQ ID NO: 25487 - protein, 9 aa, Homo sapiens
  AACR GENIE Results; MTOR_p.E1799K; A0301
VMNFKAVLH

SEQ ID NO: 25488 - protein, 9 aa, Homo sapiens
  AACR GENIE Results; MTOR_p.I2500F; C1203
KAIQFINRV

SEQ ID NO: 25489 - protein, 9 aa, Homo sapiens
  AACR GENIE Results; MTOR_p.I2500F; C0602
KAIQFINRV

SEQ ID NO: 25490 - protein, 9 aa, Homo sapiens
  AACR GENIE Results; MTOR_p.I2500F; C0202
KAIQFINRV

SEQ ID NO: 25491 - protein, 9 aa, Homo sapiens
  AACR GENIE Results; MTOR_p.I2500F; B1501
ALNKKAIQF

SEQ ID NO: 25492 - protein, 9 aa, Homo sapiens
  AACR GENIE Results; MTOR_p.M2327I; A2402
NYTRSLAVI

SEQ ID NO: 25493 - protein, 8 aa, Homo sapiens
  AACR GENIE Results; MTOR_p.M2327I; B1501
AVISMVGY

SEQ ID NO: 25494 - protein, 8 aa, Homo sapiens
  AACR GENIE Results; MTOR_p.M2327I; C0304
ISMVGYIL

SEQ ID NO: 25495 - protein, 9 aa, Homo sapiens
  AACR GENIE Results; MTOR_p.M2327I; B3501
LAVISMVGY

SEQ ID NO: 25496 - protein, 9 aa, Homo sapiens
  AACR GENIE Results; MTOR_p.M2327I; B1501
LAVISMVGY

SEQ ID NO: 25497 - protein, 8 aa, Homo sapiens
  AACR GENIE Results; MTOR_p.M2327I; A0201
SLAVISMV

SEQ ID NO: 25498 - protein, 10 aa, Homo sapiens
  AACR GENIE Results; MTOR_p.M2327I; B1501
SLAVISMVGY

SEQ ID NO: 25499 - protein, 8 aa, Homo sapiens
  AACR GENIE Results; MTOR_p.M2327I; A2601
AVISMVGY

SEQ ID NO: 25500 - protein, 8 aa, Homo sapiens
  AACR GENIE Results; MTOR_p.M2327I; C0303
ISMVGYIL

SEQ ID NO: 25501 - protein, 9 aa, Homo sapiens
  AACR GENIE Results; MTOR_p.M2387I; A0201
RMLTNAIEV

SEQ ID NO: 25502 - protein, 10 aa, Homo sapiens
  AACR GENIE Results; MTOR_p.M2387I; B1801
IEVTGLDGNY

SEQ ID NO: 25503 - protein, 10 aa, Homo sapiens
  AACR GENIE Results; MTOR_p.M2387I; B4403
IEVTGLDGNY

SEQ ID NO: 25504 - protein, 10 aa, Homo sapiens
  AACR GENIE Results; MTOR_p.R1235W; B4403
EEDPLIYQHW

SEQ ID NO: 25505 - protein, 10 aa, Homo sapiens
  AACR GENIE Results; MTOR_p.R1235W; B4402
EEDPLIYQHW

SEQ ID NO: 25506 - protein, 11 aa, Homo sapiens
  AACR GENIE Results; MTOR_p.R1235W; B4402
EEEDPLIYQHW

SEQ ID NO: 25507 - protein, 11 aa, Homo sapiens
  AACR GENIE Results; MTOR_p.R1235W; B4403
EEEDPLIYQHW

SEQ ID NO: 25508 - protein, 9 aa, Homo sapiens
  AACR GENIE Results; MTOR_p.R1235W; B4402
EDPLIYQHW

SEQ ID NO: 25509 - protein, 9 aa, Homo sapiens
  AACR GENIE Results; MTOR_p.R1235W; B4403
EDPLIYQHW

SEQ ID NO: 25510 - protein, 10 aa, Homo sapiens
  AACR GENIE Results; MTOR_p.R1235W; A2301
EEDPLIYQHW

SEQ ID NO: 25511 - protein, 9 aa, Homo sapiens
  AACR GENIE Results; MTOR_p.S2215Y; A0201
LLANDPTYL

SEQ ID NO: 25512 - protein, 9 aa, Homo sapiens
  AACR GENIE Results; MTOR_p.S2215Y; A3101
LANDPTYLR

SEQ ID NO: 25513 - protein, 9 aa, Homo sapiens
  AACR GENIE Results; MTOR_p.S2215Y; A6801
LANDPTYLR

SEQ ID NO: 25514 - protein, 8 aa, Homo sapiens
  AACR GENIE Results; MTOR_p.S2215Y; C0304
LANDPTYL

SEQ ID NO: 25515 - protein, 10 aa, Homo sapiens
  AACR GENIE Results; MTOR_p.S2215Y; A0201
TLLANDPTYL

SEQ ID NO: 25516 - protein, 9 aa, Homo sapiens
  AACR GENIE Results; MTOR_p.S2215Y; B3501
TLLANDPTY

SEQ ID NO: 25517 - protein, 10 aa, Homo sapiens
  AACR GENIE Results; MTOR_p.S2215Y; A1101
LANDPTYLRK

SEQ ID NO: 25518 - protein, 9 aa, Homo sapiens
  AACR GENIE Results; MTOR_p.S2215Y; B1501
TLLANDPTY

SEQ ID NO: 25519 - protein, 9 aa, Homo sapiens
  AACR GENIE Results; MTOR_p.S2215Y; A1101
ANDPTYLRK

SEQ ID NO: 25520 - protein, 8 aa, Homo sapiens
  AACR GENIE Results; MTOR_p.S2215Y; C0303
LANDPTYL

SEQ ID NO: 25521 - protein, 9 aa, Homo sapiens
  AACR GENIE Results; MTOR_p.S2215Y; B1302
LLANDPTYL

SEQ ID NO: 25522 - protein, 9 aa, Homo sapiens
  AACR GENIE Results; MTOR_p.S2215Y; A2301
TYLRKNLSI

SEQ ID NO: 25523 - protein, 8 aa, Homo sapiens
  AACR GENIE Results; MTOR_p.S2215Y; C0501
LANDPTYL

SEQ ID NO: 25524 - protein, 10 aa, Homo sapiens
  AACR GENIE Results; MTOR_p.S2215Y; A6801
LANDPTYLRK

SEQ ID NO: 25525 - protein, 8 aa, Homo sapiens
  AACR GENIE Results; MTOR_p.S2215Y; C1502
LANDPTYL

SEQ ID NO: 25526 - protein, 8 aa, Homo sapiens
  AACR GENIE Results; MTOR_p.S2215Y; C0202
LANDPTYL

SEQ ID NO: 25527 - protein, 9 aa, Homo sapiens
  AACR GENIE Results; MTOR_p.T1977K; B5101
QALIYPLKV

SEQ ID NO: 25528 - protein, 10 aa, Homo sapiens
  AACR GENIE Results; MTOR_p.T1977K; A0301
LIYPLKVASK

SEQ ID NO: 25529 - protein, 11 aa, Homo sapiens
  AACR GENIE Results; MTOR_p.T1977K; A0301
KVASKSTTTAR

SEQ ID NO: 25530 - protein, 8 aa, Homo sapiens
  AACR GENIE Results; MTOR_p.T1977K; B1302
ALIYPLKV

SEQ ID NO: 25531 - protein, 9 aa, Homo sapiens
  AACR GENIE Results; MTOR_p.T1977K; B1302
QALIYPLKV

SEQ ID NO: 25532 - protein, 9 aa, Homo sapiens
  AACR GENIE Results; MTOR_p.T1977K; C1502
QALIYPLKV

SEQ ID NO: 25533 - protein, 11 aa, Homo sapiens
  AACR GENIE Results; MTOR_p.T1977K; A3101
KVASKSTTTAR

SEQ ID NO: 25534 - protein, 8 aa, Homo sapiens
  AACR GENIE Results; MTOR_p.T1977K; B5101
YPLKVASK

SEQ ID NO: 25535 - protein, 9 aa, Homo sapiens
  AACR GENIE Results; MYBL1_p.A562V; B3503
TPTPFKNVL

SEQ ID NO: 25536 - protein, 9 aa, Homo sapiens
  AACR GENIE Results; MYBL1_p.A562V; B0702
TPTPFKNVL

SEQ ID NO: 25537 - protein, 9 aa, Homo sapiens
  AACR GENIE Results; MYBL1_p.A562V; B5501
TPFKNVLAA

SEQ ID NO: 25538 - protein, 9 aa, Homo sapiens
  AACR GENIE Results; MYBL1_p.A562V; B3501
TPTPFKNVL

SEQ ID NO: 25539 - protein, 9 aa, Homo sapiens
  AACR GENIE Results; MYBL1_p.Q334H; B1501
AQHNSPTKF

SEQ ID NO: 25540 - protein, 10 aa, Homo sapiens
  AACR GENIE Results; MYC_p.S161L; B0702
LPNPARGHSV

SEQ ID NO: 25541 - protein, 9 aa, Homo sapiens
  AACR GENIE Results; MYC_p.S161L; A6801
DSGLPNPAR

SEQ ID NO: 25542 - protein, 10 aa, Homo sapiens
  AACR GENIE Results; MYC_p.S161L; B5101
LPNPARGHSV

SEQ ID NO: 25543 - protein, 10 aa, Homo sapiens
  AACR GENIE Results; MYC_p.S161L; B0801
LPNPARGHSV

SEQ ID NO: 25544 - protein, 11 aa, Homo sapiens
  AACR GENIE Results; MYC_p.S161L; A0201
GLPNPARGHSV

SEQ ID NO: 25545 - protein, 8 aa, Homo sapiens
  AACR GENIE Results; MYD88_p.L265P; C0702
KRPIPIKY

SEQ ID NO: 25546 - protein, 10 aa, Homo sapiens
  AACR GENIE Results; MYOD1_p.C206F; B0702
SPRSNFSDGM

SEQ ID NO: 25547 - protein, 8 aa, Homo sapiens
  AACR GENIE Results; MYOD1_p.C206F; A0101
FSDGMMDY

SEQ ID NO: 25548 - protein, 9 aa, Homo sapiens
  AACR GENIE Results; MYOD1_p.C206F; B5101
DASSPRSNF

SEQ ID NO: 25549 - protein, 9 aa, Homo sapiens
  AACR GENIE Results; MYOD1_p.C206F; B3501
DASSPRSNF

SEQ ID NO: 25550 - protein, 9 aa, Homo sapiens
  AACR GENIE Results; MYOD1_p.C206F; A2601
DASSPRSNF

SEQ ID NO: 25551 - protein, 9 aa, Homo sapiens
  AACR GENIE Results; NBN_p.M152I; A0301
IVSVKVTIK

SEQ ID NO: 25552 - protein, 9 aa, Homo sapiens
  AACR GENIE Results; NBN_p.M152I; A1101
IVSVKVTIK

SEQ ID NO: 25553 - protein, 10 aa, Homo sapiens
  AACR GENIE Results; NF1_p.K296N; A1101
VVDENNMNNK

SEQ ID NO: 25554 - protein, 11 aa, Homo sapiens
  AACR GENIE Results; NF1_p.K296N; A6801
DVVDENNMNNK

SEQ ID NO: 25555 - protein, 10 aa, Homo sapiens
  AACR GENIE Results; NF1_p.K296N; A0301
VVDENNMNNK

SEQ ID NO: 25556 - protein, 9 aa, Homo sapiens
  AACR GENIE Results; NF1_p.K296N; B1801
DENNMNNKL

SEQ ID NO: 25557 - protein, 10 aa, Homo sapiens
  AACR GENIE Results; NF1_p.K296N; B4403
DENNMNNKLF

SEQ ID NO: 25558 - protein, 10 aa, Homo sapiens
  AACR GENIE Results; NF1_p.K296N; B4402
DENNMNNKLF

SEQ ID NO: 25559 - protein, 11 aa, Homo sapiens
  AACR GENIE Results; NF1_p.K296N; C0802
VVDENNMNNKL

SEQ ID NO: 25560 - protein, 9 aa, Homo sapiens
  AACR GENIE Results; NF1_p.Y2285Tfs*5; A2402
KGPDTTVKF

SEQ ID NO: 25561 - protein, 9 aa, Homo sapiens
  AACR GENIE Results; NF1_p.Y2285Tfs*5; B1501
KGPDTTVKF

SEQ ID NO: 25562 - protein, 9 aa, Homo sapiens
  AACR GENIE Results; NF1_p.Y2285Tfs*5; C0102
KGPDTTVKF

SEQ ID NO: 25563 - protein, 9 aa, Homo sapiens
  AACR GENIE Results; NF1_p.Y2285Tfs*5; B5701
KGPDTTVKF

SEQ ID NO: 25564 - protein, 9 aa, Homo sapiens
  AACR GENIE Results; NF1_p.Y2285Tfs*5; C0202
KGPDTTVKF

SEQ ID NO: 25565 - protein, 11 aa, Homo sapiens
  AACR GENIE Results; NF1_p.Y2285Tfs*5; B1501
CLKGPDTTVKF

SEQ ID NO: 25566 - protein, 9 aa, Homo sapiens
  AACR GENIE Results; NF1_p.Y2285Tfs*5; A1101
KGPDTTVKF

SEQ ID NO: 25567 - protein, 8 aa, Homo sapiens
  AACR GENIE Results; NF1_p.Y2285Tfs*5; C0501
GPDTTVKF

SEQ ID NO: 25568 - protein, 9 aa, Homo sapiens
  AACR GENIE Results; NF1_p.Y2285Tfs*5; C0501
KGPDTTVKF

SEQ ID NO: 25569 - protein, 9 aa, Homo sapiens
  AACR GENIE Results; NF2_p.M514V; C0401
SFDFKDTDV

SEQ ID NO: 25570 - protein, 9 aa, Homo sapiens
  AACR GENIE Results; NF2_p.M514V; B0801
DTDVKRLSM

SEQ ID NO: 25571 - protein, 9 aa, Homo sapiens
  AACR GENIE Results; NFE2L2_p.D29N; B2702
QDINLGVSR

SEQ ID NO: 25572 - protein, 10 aa, Homo sapiens
  AACR GENIE Results; NFE2L2_p.D29N; B2702
RQDINLGVSR

SEQ ID NO: 25573 - protein, 9 aa, Homo sapiens
  AACR GENIE Results; NFE2L2_p.D29N; C1502
INLGVSREV

SEQ ID NO: 25574 - protein, 9 aa, Homo sapiens
  AACR GENIE Results; NFE2L2_p.D29N; A0201
ILWRQDINL

SEQ ID NO: 25575 - protein, 9 aa, Homo sapiens
  AACR GENIE Results; NFE2L2_p.D29N; A6801
QDINLGVSR

SEQ ID NO: 25576 - protein, 8 aa, Homo sapiens
  AACR GENIE Results; NFE2L2_p.D29N; A3303
DINLGVSR

SEQ ID NO: 25577 - protein, 8 aa, Homo sapiens
  AACR GENIE Results; NFE2L2_p.D29N; B1302
RQDINLGV

SEQ ID NO: 25578 - protein, 9 aa, Homo sapiens
  AACR GENIE Results; NFE2L2_p.D29N; A3303
QDINLGVSR

SEQ ID NO: 25579 - protein, 10 aa, Homo sapiens
  AACR GENIE Results; NFE2L2_p.D29N; A3101
RQDINLGVSR

SEQ ID NO: 25580 - protein, 8 aa, Homo sapiens
  AACR GENIE Results; NFE2L2_p.D29N; A6801
DINLGVSR

SEQ ID NO: 25581 - protein, 10 aa, Homo sapiens
  AACR GENIE Results; NFE2L2_p.D29N; B2705
RQDINLGVSR

SEQ ID NO: 25582 - protein, 8 aa, Homo sapiens
  AACR GENIE Results; NFE2L2_p.D29N; C0802
RQDINLGV

SEQ ID NO: 25583 - protein, 11 aa, Homo sapiens
  AACR GENIE Results; NFE2L2_p.D29N; B4002
QDINLGVSREV

SEQ ID NO: 25584 - protein, 9 aa, Homo sapiens
  AACR GENIE Results; NFE2L2_p.D29N; A3101
QDINLGVSR

SEQ ID NO: 25585 - protein, 9 aa, Homo sapiens
  AACR GENIE Results; NFE2L2_p.E79K; C0501
QLDEKTGEF

SEQ ID NO: 25586 - protein, 10 aa, Homo sapiens
  AACR GENIE Results; NFE2L2_p.E79K; A0201
QLDEKTGEFL

SEQ ID NO: 25587 - protein, 9 aa, Homo sapiens
  AACR GENIE Results; NFE2L2_p.E79K; A0101
QLDEKTGEF

SEQ ID NO: 25588 - protein, 10 aa, Homo sapiens
  AACR GENIE Results; NFE2L2_p.E79K; C0501
QLDEKTGEFL

SEQ ID NO: 25589 - protein, 9 aa, Homo sapiens
  AACR GENIE Results; NFE2L2_p.G31A; A1101
QDIDLAVSR

SEQ ID NO: 25590 - protein, 8 aa, Homo sapiens
  AACR GENIE Results; NFE2L2_p.G31A; B5101
DLAVSREV

SEQ ID NO: 25591 - protein, 9 aa, Homo sapiens
  AACR GENIE Results; NFE2L2_p.G31A; B1501
AVSREVFDF

SEQ ID NO: 25592 - protein, 9 aa, Homo sapiens
  AACR GENIE Results; NFE2L2_p.G81S; C0802
QLDEETSEF

SEQ ID NO: 25593 - protein, 10 aa, Homo sapiens
  AACR GENIE Results; NFE2L2_p.G81S; C0802
QLDEETSEFL

SEQ ID NO: 25594 - protein, 9 aa, Homo sapiens
  AACR GENIE Results; NFE2L2_p.G81S; C0501
QLDEETSEF

SEQ ID NO: 25595 - protein, 10 aa, Homo sapiens
  AACR GENIE Results; NFE2L2_p.G81S; B1501
LQLDEETSEF

SEQ ID NO: 25596 - protein, 9 aa, Homo sapiens
  AACR GENIE Results; NFE2L2_p.R34Q; B1501
GVSQEVFDF

SEQ ID NO: 25597 - protein, 9 aa, Homo sapiens
  AACR GENIE Results; NFE2L2_p.R34Q; B5101
IDLGVSQEV

SEQ ID NO: 25598 - protein, 9 aa, Homo sapiens
  AACR GENIE Results; NFE2L2_p.R34Q; A0201
IDLGVSQEV

SEQ ID NO: 25599 - protein, 11 aa, Homo sapiens
  AACR GENIE Results; NKX2-1_p.G85Afs*10; B3501
SAVGATATATW

SEQ ID NO: 25600 - protein, 11 aa, Homo sapiens
  AACR GENIE Results; NKX2-1_p.G85Afs*10; B1501
SAVGATATATW

SEQ ID NO: 25601 - protein, 9 aa, Homo sapiens
  AACR GENIE Results; NKX2-1_p.G85Afs*10; C0303
SAVGATATA

SEQ ID NO: 25602 - protein, 11 aa, Homo sapiens
  AACR GENIE Results; NKX2-1_p.G85Afs*10; A2601
SAVGATATATW

SEQ ID NO: 25603 - protein, 9 aa, Homo sapiens
  AACR GENIE Results; NKX2-1_p.G85Afs*10; C0304
SAVGATATA

SEQ ID NO: 25604 - protein, 9 aa, Homo sapiens
  AACR GENIE Results; NKX2-1_p.G85Afs*10; B3501
SAVGATATA

SEQ ID NO: 25605 - protein, 10 aa, Homo sapiens
  AACR GENIE Results; NKX2-1_p.G85Afs*10; B4402
AVGATATATW

SEQ ID NO: 25606 - protein, 10 aa, Homo sapiens
  AACR GENIE Results; NKX2-1_p.G85Afs*10; B4403
AVGATATATW

SEQ ID NO: 25607 - protein, 9 aa, Homo sapiens
  AACR GENIE Results; NKX2-1_p.L17F; B3501
TPFSVSDIF

SEQ ID NO: 25608 - protein, 10 aa, Homo sapiens
  AACR GENIE Results; NKX2-1_p.L17F; B3501
DIFSPLEESY

SEQ ID NO: 25609 - protein, 9 aa, Homo sapiens
  AACR GENIE Results; NKX2-1_p.L17F; B3501
IFSPLEESY

SEQ ID NO: 25610 - protein, 9 aa, Homo sapiens
  AACR GENIE Results; NKX2-1_p.Q204L; A0201
SMIHLTPTL

SEQ ID NO: 25611 - protein, 9 aa, Homo sapiens
  AACR GENIE Results; NKX2-1_p.Q204L; B1501
SMIHLTPTL

SEQ ID NO: 25612 - protein, 9 aa, Homo sapiens
  AACR GENIE Results; NKX2-1_p.Q204L; C1203
LTPTLVKIW

SEQ ID NO: 25613 - protein, 10 aa, Homo sapiens
  AACR GENIE Results; NKX2-1_p.R178Q; A0301
QVYELEQRFK

SEQ ID NO: 25614 - protein, 9 aa, Homo sapiens
  AACR GENIE Results; NKX2-1_p.R178Q; B1501
QVYELEQRF

SEQ ID NO: 25615 - protein, 9 aa, Homo sapiens
  AACR GENIE Results; NKX2-1_p.R178Q; B3501
QVYELEQRF

SEQ ID NO: 25616 - protein, 10 aa, Homo sapiens
  AACR GENIE Results; NKX2-1_p.R178Q; A1101
QVYELEQRFK

SEQ ID NO: 25617 - protein, 9 aa, Homo sapiens
  AACR GENIE Results; NKX2-1_p.R178Q; C0602
QRFKQQKYL

SEQ ID NO: 25618 - protein, 10 aa, Homo sapiens
  AACR GENIE Results; NKX2-1_p.R178Q; B1501
AQVYELEQRF

SEQ ID NO: 25619 - protein, 9 aa, Homo sapiens
  AACR GENIE Results; NKX2-1_p.R178Q; B4403
QVYELEQRF

SEQ ID NO: 25620 - protein, 9 aa, Homo sapiens
  AACR GENIE Results; NKX2-1_p.R178Q; A2601
QVYELEQRF

SEQ ID NO: 25621 - protein, 9 aa, Homo sapiens
  AACR GENIE Results; NOTCH1_p.A2077T; A2402
SYETTKVLL

SEQ ID NO: 25622 - protein, 9 aa, Homo sapiens
  AACR GENIE Results; NOTCH1_p.A2077T; B5701
TTKVLLDHF

SEQ ID NO: 25623 - protein, 8 aa, Homo sapiens
  AACR GENIE Results; NOTCH1_p.A2077T; B4001
YETTKVLL

SEQ ID NO: 25624 - protein, 8 aa, Homo sapiens
  AACR GENIE Results; NOTCH1_p.A2077T; B4002
YETTKVLL

SEQ ID NO: 25625 - protein, 9 aa, Homo sapiens
  AACR GENIE Results; NOTCH1_p.A2077T; A2301
SYETTKVLL

SEQ ID NO: 25626 - protein, 10 aa, Homo sapiens
  AACR GENIE Results; NOTCH1_p.A2077T; A6802
ETTKVLLDHF

SEQ ID NO: 25627 - protein, 8 aa, Homo sapiens
  AACR GENIE Results; NOTCH1_p.A2077T; B4901
YETTKVLL

SEQ ID NO: 25628 - protein, 11 aa, Homo sapiens
  AACR GENIE Results; NOTCH1_p.A2077T; A6802
ETTKVLLDHFA

SEQ ID NO: 25629 - protein, 8 aa, Homo sapiens
  AACR GENIE Results; NOTCH1_p.A2077T; B3701
YETTKVLL

SEQ ID NO: 25630 - protein, 11 aa, Homo sapiens
  AACR GENIE Results; NOTCH1_p.A2077T; B4002
REGSYETTKVL

SEQ ID NO: 25631 - protein, 9 aa, Homo sapiens
  AACR GENIE Results; NOTCH1_p.A2077T; C0401
SYETTKVLL

SEQ ID NO: 25632 - protein, 9 aa, Homo sapiens
  AACR GENIE Results; NOTCH1_p.A2077T; B5801
GSYETTKVL

SEQ ID NO: 25633 - protein, 11 aa, Homo sapiens
  AACR GENIE Results; NOTCH1_p.G1788S; B4001
REPLSEDSVGL

SEQ ID NO: 25634 - protein, 10 aa, Homo sapiens
  AACR GENIE Results; NOTCH1_p.G1788S; B4001
SEDSVGLKPL

SEQ ID NO: 25635 - protein, 9 aa, Homo sapiens
  AACR GENIE Results; NOTCH1_p.S2467L; B4001
QESPALPTL

SEQ ID NO: 25636 - protein, 9 aa, Homo sapiens
  AACR GENIE Results; NOTCH1_p.S2467L; B4403
QESPALPTL

SEQ ID NO: 25637 - protein, 10 aa, Homo sapiens
  AACR GENIE Results; NOTCH1_p.S2467L; B4001
QESPALPTLL

SEQ ID NO: 25638 - protein, 9 aa, Homo sapiens
  AACR GENIE Results; NOTCH1_p.S2467L; B4402
QESPALPTL

SEQ ID NO: 25639 - protein, 9 aa, Homo sapiens
  AACR GENIE Results; NOTCH1_p.S2467L; B3501
LPTLLPSSL

SEQ ID NO: 25640 - protein, 9 aa, Homo sapiens
  AACR GENIE Results; NOTCH2_p.R2347H; B3501
MAHLPSVAF

SEQ ID NO: 25641 - protein, 9 aa, Homo sapiens
  AACR GENIE Results; NOTCH2_p.R2347H; B1501
MAHLPSVAF

SEQ ID NO: 25642 - protein, 9 aa, Homo sapiens
  AACR GENIE Results; NOTCH2_p.R2347H; C0304
MAHLPSVAF

SEQ ID NO: 25643 - protein, 9 aa, Homo sapiens
  AACR GENIE Results; NOTCH2_p.R2347H; C0303
MAHLPSVAF

SEQ ID NO: 25644 - protein, 9 aa, Homo sapiens
  AACR GENIE Results; NOTCH3_p.P2033S; B0702
QPSGPRSSP

SEQ ID NO: 25645 - protein, 10 aa, Homo sapiens
  AACR GENIE Results; NOTCH3_p.R1834W; C0802
WTDRTGETAL

SEQ ID NO: 25646 - protein, 10 aa, Homo sapiens
  AACR GENIE Results; NRAS_p.E62K; A0101
ILDTAGQKEY

SEQ ID NO: 25647 - protein, 10 aa, Homo sapiens
  AACR GENIE Results; NRAS_p.E62K; C0302
ILDTAGQKEY

SEQ ID NO: 25648 - protein, 9 aa, Homo sapiens
  AACR GENIE Results; NRAS_p.E62K; A3101
GQKEYSAMR

SEQ ID NO: 25649 - protein, 11 aa, Homo sapiens
  AACR GENIE Results; NRAS_p.E62K; A2601
DTAGQKEYSAM

SEQ ID NO: 25650 - protein, 10 aa, Homo sapiens
  AACR GENIE Results; NRAS_p.E62K; B1501
ILDTAGQKEY

SEQ ID NO: 25651 - protein, 10 aa, Homo sapiens
  AACR GENIE Results; NRAS_p.E62K; B5801
ILDTAGQKEY

SEQ ID NO: 25652 - protein, 8 aa, Homo sapiens
  AACR GENIE Results; NRAS_p.E62K; B1501
GQKEYSAM

SEQ ID NO: 25653 - protein, 11 aa, Homo sapiens
  AACR GENIE Results; NRAS_p.E62K; A2601
DILDTAGQKEY

SEQ ID NO: 25654 - protein, 11 aa, Homo sapiens
  AACR GENIE Results; NRAS_p.E62K; B1502
DILDTAGQKEY

SEQ ID NO: 25655 - protein, 10 aa, Homo sapiens
  AACR GENIE Results; NRAS_p.E62K; B1502
ILDTAGQKEY

SEQ ID NO: 25656 - protein, 10 aa, Homo sapiens
  AACR GENIE Results; NRAS_p.E62K; B4403
KEYSAMRDQY

SEQ ID NO: 25657 - protein, 9 aa, Homo sapiens
  AACR GENIE Results; NRAS_p.E62K; C1602
LDTAGQKEY

SEQ ID NO: 25658 - protein, 11 aa, Homo sapiens
  AACR GENIE Results; NRAS_p.E62K; A6801
DILDTAGQKEY

SEQ ID NO: 25659 - protein, 10 aa, Homo sapiens
  AACR GENIE Results; NRAS_p.E62K; B4601
ILDTAGQKEY

SEQ ID NO: 25660 - protein, 10 aa, Homo sapiens
  AACR GENIE Results; NRAS_p.E62K; B3901
ILDTAGQKEY

SEQ ID NO: 25661 - protein, 10 aa, Homo sapiens
  AACR GENIE Results; NRAS_p.E62K; A2902
ILDTAGQKEY

SEQ ID NO: 25662 - protein, 10 aa, Homo sapiens
  AACR GENIE Results; NRAS_p.E62K; C0802
ILDTAGQKEY

SEQ ID NO: 25663 - protein, 9 aa, Homo sapiens
  AACR GENIE Results; NRAS_p.E62K; B3906
TAGQKEYSA

SEQ ID NO: 25664 - protein, 10 aa, Homo sapiens
  AACR GENIE Results; NRAS_p.E62K; A3002
ILDTAGQKEY

SEQ ID NO: 25665 - protein, 10 aa, Homo sapiens
  AACR GENIE Results; NRAS_p.E62K; A0201
ILDTAGQKEY

SEQ ID NO: 25666 - protein, 10 aa, Homo sapiens
  AACR GENIE Results; NRAS_p.E62K; B4403
ILDTAGQKEY

SEQ ID NO: 25667 - protein, 8 aa, Homo sapiens
  AACR GENIE Results; NRAS_p.E62K; A2601
DTAGQKEY

SEQ ID NO: 25668 - protein, 11 aa, Homo sapiens
  AACR GENIE Results; NRAS_p.E62K; B3501
DILDTAGQKEY

SEQ ID NO: 25669 - protein, 11 aa, Homo sapiens
  AACR GENIE Results; NRAS_p.E62K; B5801
DILDTAGQKEY

SEQ ID NO: 25670 - protein, 10 aa, Homo sapiens
  AACR GENIE Results; NRAS_p.E62K; A2901
ILDTAGQKEY

SEQ ID NO: 25671 - protein, 11 aa, Homo sapiens
  AACR GENIE Results; NRAS_p.E62K; B4403
DILDTAGQKEY

SEQ ID NO: 25672 - protein, 10 aa, Homo sapiens
  AACR GENIE Results; NRAS_p.E62K; C0801
ILDTAGQKEY

SEQ ID NO: 25673 - protein, 9 aa, Homo sapiens
  AACR GENIE Results; NRAS_p.E62K; B4403
LDTAGQKEY

SEQ ID NO: 25674 - protein, 11 aa, Homo sapiens
  AACR GENIE Results; NRAS_p.E62K; B2702
DILDTAGQKEY

SEQ ID NO: 25675 - protein, 11 aa, Homo sapiens
  AACR GENIE Results; NRAS_p.E62K; A3301
DILDTAGQKEY

SEQ ID NO: 25676 - protein, 10 aa, Homo sapiens
  AACR GENIE Results; NRAS_p.E62K; A6802
DTAGQKEYSA

SEQ ID NO: 25677 - protein, 10 aa, Homo sapiens
  AACR GENIE Results; NRAS_p.E62K; B4402
ILDTAGQKEY

SEQ ID NO: 25678 - protein, 9 aa, Homo sapiens
  AACR GENIE Results; NRAS_p.E62K; A6801
DILDTAGQK

SEQ ID NO: 25679 - protein, 10 aa, Homo sapiens
  AACR GENIE Results; NRAS_p.E62K; B4402
KEYSAMRDQY

SEQ ID NO: 25680 - protein, 10 aa, Homo sapiens
  AACR GENIE Results; NRAS_p.G12C; A1101
VVVGACGVGK

SEQ ID NO: 25681 - protein, 9 aa, Homo sapiens
  AACR GENIE Results; NRAS_p.G12C; A1101
VVGACGVGK

SEQ ID NO: 25682 - protein, 10 aa, Homo sapiens
  AACR GENIE Results; NRAS_p.G12C; A0301
VVVGACGVGK

SEQ ID NO: 25683 - protein, 9 aa, Homo sapiens
  AACR GENIE Results; NRAS_p.G12C; A0301
VVGACGVGK

SEQ ID NO: 25684 - protein, 10 aa, Homo sapiens
  AACR GENIE Results; NRAS_p.G12C; A6801
VVVGACGVGK

SEQ ID NO: 25685 - protein, 9 aa, Homo sapiens
  AACR GENIE Results; NRAS_p.G12C; C0102
ACGVGKSAL

SEQ ID NO: 25686 - protein, 9 aa, Homo sapiens
  AACR GENIE Results; NRAS_p.G12C; B0702
ACGVGKSAL

SEQ ID NO: 25687 - protein, 10 aa, Homo sapiens
  AACR GENIE Results; NRAS_p.G12C; B2702
VVVGACGVGK

SEQ ID NO: 25688 - protein, 10 aa, Homo sapiens
  AACR GENIE Results; NRAS_p.G12C; B0702
GACGVGKSAL

SEQ ID NO: 25689 - protein, 8 aa, Homo sapiens
  AACR GENIE Results; NRAS_p.G12C; B0801
CGVGKSAL

SEQ ID NO: 25690 - protein, 10 aa, Homo sapiens
  AACR GENIE Results; NRAS_p.G12C; C0304
GACGVGKSAL

SEQ ID NO: 25691 - protein, 8 aa, Homo sapiens
  AACR GENIE Results; NRAS_p.G12D; B1402
DGVGKSAL

SEQ ID NO: 25692 - protein, 10 aa, Homo sapiens
  AACR GENIE Results; NRAS_p.G12D; A1101
VVVGADGVGK

SEQ ID NO: 25693 - protein, 10 aa, Homo sapiens
  AACR GENIE Results; NRAS_p.G12D; C0802
GADGVGKSAL

SEQ ID NO: 25694 - protein, 8 aa, Homo sapiens
  AACR GENIE Results; NRAS_p.G12D; B0801
DGVGKSAL

SEQ ID NO: 25695 - protein, 11 aa, Homo sapiens
  AACR GENIE Results; NRAS_p.G12D; B2702
LVVVGADGVGK

SEQ ID NO: 25696 - protein, 9 aa, Homo sapiens
  AACR GENIE Results; NRAS_p.G12D; A1101
VVGADGVGK

SEQ ID NO: 25697 - protein, 10 aa, Homo sapiens
  AACR GENIE Results; NRAS_p.G12D; A6801
VVVGADGVGK

SEQ ID NO: 25698 - protein, 9 aa, Homo sapiens
  AACR GENIE Results; NRAS_p.G12D; B3701
ADGVGKSAL

SEQ ID NO: 25699 - protein, 8 aa, Homo sapiens
  AACR GENIE Results; NRAS_p.G12D; B1401
DGVGKSAL

SEQ ID NO: 25700 - protein, 9 aa, Homo sapiens
  AACR GENIE Results; NRAS_p.G12D; B0702
ADGVGKSAL

SEQ ID NO: 25701 - protein, 11 aa, Homo sapiens
  AACR GENIE Results; NRAS_p.G12D; B0801
VGADGVGKSAL

SEQ ID NO: 25702 - protein, 10 aa, Homo sapiens
  AACR GENIE Results; NRAS_p.G12D; B5101
DGVGKSALTI

SEQ ID NO: 25703 - protein, 10 aa, Homo sapiens
  AACR GENIE Results; NRAS_p.G12D; B3502
GADGVGKSAL

SEQ ID NO: 25704 - protein, 10 aa, Homo sapiens
  AACR GENIE Results; NRAS_p.G12D; B4001
GADGVGKSAL

SEQ ID NO: 25705 - protein, 10 aa, Homo sapiens
  AACR GENIE Results; NRAS_p.G12D; B2702
VVVGADGVGK

SEQ ID NO: 25706 - protein, 9 aa, Homo sapiens
  AACR GENIE Results; NRAS_p.G12D; A0206
LVVVGADGV

SEQ ID NO: 25707 - protein, 9 aa, Homo sapiens
  AACR GENIE Results; NRAS_p.G12D; B4002
ADGVGKSAL

SEQ ID NO: 25708 - protein, 10 aa, Homo sapiens
  AACR GENIE Results; NRAS_p.G12D; A0301
VVVGADGVGK

SEQ ID NO: 25709 - protein, 10 aa, Homo sapiens
  AACR GENIE Results; NRAS_p.G12D; C0501
GADGVGKSAL

SEQ ID NO: 25710 - protein, 10 aa, Homo sapiens
  AACR GENIE Results; NRAS_p.G12D; C0801
GADGVGKSAL

SEQ ID NO: 25711 - protein, 11 aa, Homo sapiens
  AACR GENIE Results; NRAS_p.G12D; A0206
VVVGADGVGKS

SEQ ID NO: 25712 - protein, 10 aa, Homo sapiens
  AACR GENIE Results; NRAS_p.G12D; B0702
GADGVGKSAL

SEQ ID NO: 25713 - protein, 11 aa, Homo sapiens
  AACR GENIE Results; NRAS_p.G12D; A1101
LVVVGADGVGK

SEQ ID NO: 25714 - protein, 10 aa, Homo sapiens
  AACR GENIE Results; NRAS_p.G12D; A0206
KLVVVGADGV

SEQ ID NO: 25715 - protein, 9 aa, Homo sapiens
  AACR GENIE Results; NRAS_p.G12D; A0205
LVVVGADGV

SEQ ID NO: 25716 - protein, 10 aa, Homo sapiens
  AACR GENIE Results; NRAS_p.G12D; A0201
KLVVVGADGV

SEQ ID NO: 25717 - protein, 11 aa, Homo sapiens
  AACR GENIE Results; NRAS_p.G12D; A2601
VVVGADGVGKS

SEQ ID NO: 25718 - protein, 10 aa, Homo sapiens
  AACR GENIE Results; NRAS_p.G12D; B1302
KLVVVGADGV

SEQ ID NO: 25719 - protein, 10 aa, Homo sapiens
  AACR GENIE Results; NRAS_p.G12D; C0102
GADGVGKSAL

SEQ ID NO: 25720 - protein, 11 aa, Homo sapiens
  AACR GENIE Results; NRAS_p.G12D; A1101
VVVGADGVGKS

SEQ ID NO: 25721 - protein, 11 aa, Homo sapiens
  AACR GENIE Results; NRAS_p.G12D; B3901
VGADGVGKSAL

SEQ ID NO: 25722 - protein, 10 aa, Homo sapiens
  AACR GENIE Results; NRAS_p.G12D; B3503
GADGVGKSAL

SEQ ID NO: 25723 - protein, 11 aa, Homo sapiens
  AACR GENIE Results; NRAS_p.G12D; A6801
VVVGADGVGKS

SEQ ID NO: 25724 - protein, 10 aa, Homo sapiens
  AACR GENIE Results; NRAS_p.G12D; C0304
GADGVGKSAL

SEQ ID NO: 25725 - protein, 10 aa, Homo sapiens
  AACR GENIE Results; NRAS_p.G12D; A0205
VGADGVGKSA

SEQ ID NO: 25726 - protein, 9 aa, Homo sapiens
  AACR GENIE Results; NRAS_p.G12D; A0301
VVGADGVGK

SEQ ID NO: 25727 - protein, 9 aa, Homo sapiens
  AACR GENIE Results; NRAS_p.G12V; A1101
VVGAVGVGK

SEQ ID NO: 25728 - protein, 9 aa, Homo sapiens
  AACR GENIE Results; NRAS_p.G12V; A0301
VVGAVGVGK

SEQ ID NO: 25729 - protein, 10 aa, Homo sapiens
  AACR GENIE Results; NRAS_p.G12V; A1101
VVVGAVGVGK

SEQ ID NO: 25730 - protein, 10 aa, Homo sapiens
  AACR GENIE Results; NRAS_p.G12V; A6801
VVVGAVGVGK

SEQ ID NO: 25731 - protein, 9 aa, Homo sapiens
  AACR GENIE Results; NRAS_p.G12V; C0102
AVGVGKSAL

SEQ ID NO: 25732 - protein, 10 aa, Homo sapiens
  AACR GENIE Results; NRAS_p.G12V; A0301
VVVGAVGVGK

SEQ ID NO: 25733 - protein, 9 aa, Homo sapiens
  AACR GENIE Results; NRAS_p.G12V; A6801
VVGAVGVGK

SEQ ID NO: 25734 - protein, 9 aa, Homo sapiens
  AACR GENIE Results; NRAS_p.G12V; B0702
AVGVGKSAL

SEQ ID NO: 25735 - protein, 11 aa, Homo sapiens
  AACR GENIE Results; NRAS_p.G12V; B2702
LVVVGAVGVGK

SEQ ID NO: 25736 - protein, 9 aa, Homo sapiens
  AACR GENIE Results; NRAS_p.G12V; B2702
VVGAVGVGK

SEQ ID NO: 25737 - protein, 8 aa, Homo sapiens
  AACR GENIE Results; NRAS_p.G12V; B0801
VGVGKSAL

SEQ ID NO: 25738 - protein, 11 aa, Homo sapiens
  AACR GENIE Results; NRAS_p.G12V; B0801
VGAVGVGKSAL

SEQ ID NO: 25739 - protein, 10 aa, Homo sapiens
  AACR GENIE Results; NRAS_p.G12V; B2702
VVVGAVGVGK

SEQ ID NO: 25740 - protein, 11 aa, Homo sapiens
  AACR GENIE Results; NRAS_p.G12V; C0704
VVVGAVGVGKS

SEQ ID NO: 25741 - protein, 10 aa, Homo sapiens
  AACR GENIE Results; NRAS_p.G12V; A0201
KLVVVGAVGV

SEQ ID NO: 25742 - protein, 10 aa, Homo sapiens
  AACR GENIE Results; NRAS_p.G12V; C0304
GAVGVGKSAL

SEQ ID NO: 25743 - protein, 10 aa, Homo sapiens
  AACR GENIE Results; NRAS_p.G12V; B4001
GAVGVGKSAL

SEQ ID NO: 25744 - protein, 8 aa, Homo sapiens
  AACR GENIE Results; NRAS_p.G12V; B1402
VGVGKSAL

SEQ ID NO: 25745 - protein, 9 aa, Homo sapiens
  AACR GENIE Results; NRAS_p.G12V; B1501
AVGVGKSAL

SEQ ID NO: 25746 - protein, 8 aa, Homo sapiens
  AACR GENIE Results; NRAS_p.G12V; B1302
VVVGAVGV

SEQ ID NO: 25747 - protein, 9 aa, Homo sapiens
  AACR GENIE Results; NRAS_p.G12V; A3101
VVGAVGVGK

SEQ ID NO: 25748 - protein, 10 aa, Homo sapiens
  AACR GENIE Results; NRAS_p.G12V; A6802
VVVGAVGVGK

SEQ ID NO: 25749 - protein, 11 aa, Homo sapiens
  AACR GENIE Results; NRAS_p.G12V; A6801
LVVVGAVGVGK

SEQ ID NO: 25750 - protein, 10 aa, Homo sapiens
  AACR GENIE Results; NRAS_p.G12V; B4002
GAVGVGKSAL

SEQ ID NO: 25751 - protein, 10 aa, Homo sapiens
  AACR GENIE Results; NRAS_p.G12V; B1302
VGVGKSALTI

SEQ ID NO: 25752 - protein, 9 aa, Homo sapiens
  AACR GENIE Results; NRAS_p.G12V; B0801
AVGVGKSAL

SEQ ID NO: 25753 - protein, 10 aa, Homo sapiens
  AACR GENIE Results; NRAS_p.G12V; C0303
GAVGVGKSAL

SEQ ID NO: 25754 - protein, 11 aa, Homo sapiens
  AACR GENIE Results; NRAS_p.G12V; A1101
LVVVGAVGVGK

SEQ ID NO: 25755 - protein, 8 aa, Homo sapiens
  AACR GENIE Results; NRAS_p.G12V; B1302
KLVVVGAV

SEQ ID NO: 25756 - protein, 10 aa, Homo sapiens
  AACR GENIE Results; NRAS_p.G12V; B0702
GAVGVGKSAL

SEQ ID NO: 25757 - protein, 9 aa, Homo sapiens
  AACR GENIE Results; NRAS_p.G12V; A3303
VVGAVGVGK

SEQ ID NO: 25758 - protein, 11 aa, Homo sapiens
  AACR GENIE Results; NRAS_p.G12V; A2601
VVVGAVGVGKS

SEQ ID NO: 25759 - protein, 10 aa, Homo sapiens
  AACR GENIE Results; NRAS_p.G12V; B1501
GAVGVGKSAL

SEQ ID NO: 25760 - protein, 10 aa, Homo sapiens
  AACR GENIE Results; NRAS_p.G12V; A3101
VVVGAVGVGK

SEQ ID NO: 25761 - protein, 9 aa, Homo sapiens
  AACR GENIE Results; NRAS_p.G12V; A6802
LVVVGAVGV

SEQ ID NO: 25762 - protein, 9 aa, Homo sapiens
  AACR GENIE Results; NRAS_p.G12V; C0304
GAVGVGKSA

SEQ ID NO: 25763 - protein, 8 aa, Homo sapiens
  AACR GENIE Results; NRAS_p.G12V; A1101
VGAVGVGK

SEQ ID NO: 25764 - protein, 11 aa, Homo sapiens
  AACR GENIE Results; NRAS_p.G12V; A6801
VVVGAVGVGKS

SEQ ID NO: 25765 - protein, 10 aa, Homo sapiens
  AACR GENIE Results; NRAS_p.G12V; A3001
VVVGAVGVGK

SEQ ID NO: 25766 - protein, 11 aa, Homo sapiens
  AACR GENIE Results; NRAS_p.G12V; A0301
LVVVGAVGVGK

SEQ ID NO: 25767 - protein, 10 aa, Homo sapiens
  AACR GENIE Results; NRAS_p.G12V; A3303
VVVGAVGVGK

SEQ ID NO: 25768 - protein, 8 aa, Homo sapiens
  AACR GENIE Results; NRAS_p.G12V; B0702
VGVGKSAL

SEQ ID NO: 25769 - protein, 8 aa, Homo sapiens
  AACR GENIE Results; NRAS_p.G12V; B4002
VVVGAVGV

SEQ ID NO: 25770 - protein, 8 aa, Homo sapiens
  AACR GENIE Results; NRAS_p.G12V; A0301
VGAVGVGK

SEQ ID NO: 25771 - protein, 10 aa, Homo sapiens
  AACR GENIE Results; NRAS_p.G13C; A1101
VVVGAGCVGK

SEQ ID NO: 25772 - protein, 9 aa, Homo sapiens
  AACR GENIE Results; NRAS_p.G13C; A1101
VVGAGCVGK

SEQ ID NO: 25773 - protein, 10 aa, Homo sapiens
  AACR GENIE Results; NRAS_p.G13C; A6801
VVVGAGCVGK

SEQ ID NO: 25774 - protein, 10 aa, Homo sapiens
  AACR GENIE Results; NRAS_p.G13C; A0301
VVVGAGCVGK

SEQ ID NO: 25775 - protein, 9 aa, Homo sapiens
  AACR GENIE Results; NRAS_p.G13C; B0801
AGCVGKSAL

SEQ ID NO: 25776 - protein, 9 aa, Homo sapiens
  AACR GENIE Results; NRAS_p.G13C; A0301
VVGAGCVGK

SEQ ID NO: 25777 - protein, 9 aa, Homo sapiens
  AACR GENIE Results; NRAS_p.G13C; B0702
AGCVGKSAL

SEQ ID NO: 25778 - protein, 9 aa, Homo sapiens
  AACR GENIE Results; NRAS_p.G13D; C0802
AGDVGKSAL

SEQ ID NO: 25779 - protein, 10 aa, Homo sapiens
  AACR GENIE Results; NRAS_p.G13D; A6801
VVVGAGDVGK

SEQ ID NO: 25780 - protein, 11 aa, Homo sapiens
  AACR GENIE Results; NRAS_p.G13D; C0704
VVVGAGDVGKS

SEQ ID NO: 25781 - protein, 8 aa, Homo sapiens
  AACR GENIE Results; NRAS_p.G13D; B4002
GDVGKSAL

SEQ ID NO: 25782 - protein, 10 aa, Homo sapiens
  AACR GENIE Results; NRAS_p.G13D; A1101
VVVGAGDVGK

SEQ ID NO: 25783 - protein, 11 aa, Homo sapiens
  AACR GENIE Results; NRAS_p.G13D; B2702
LVVVGAGDVGK

SEQ ID NO: 25784 - protein, 9 aa, Homo sapiens
  AACR GENIE Results; NRAS_p.G13D; B5101
DVGKSALTI

SEQ ID NO: 25785 - protein, 10 aa, Homo sapiens
  AACR GENIE Results; NRAS_p.G13D; B2702
VVVGAGDVGK

SEQ ID NO: 25786 - protein, 9 aa, Homo sapiens
  AACR GENIE Results; NRAS_p.G13D; A1101
VVGAGDVGK

SEQ ID NO: 25787 - protein, 9 aa, Homo sapiens
  AACR GENIE Results; NRAS_p.G13D; C0501
AGDVGKSAL

SEQ ID NO: 25788 - protein, 9 aa, Homo sapiens
  AACR GENIE Results; NRAS_p.G13D; B0702
AGDVGKSAL

SEQ ID NO: 25789 - protein, 8 aa, Homo sapiens
  AACR GENIE Results; NRAS_p.G13D; B0702
GDVGKSAL

SEQ ID NO: 25790 - protein, 10 aa, Homo sapiens
  AACR GENIE Results; NRAS_p.G13D; B4002
GDVGKSALTI

SEQ ID NO: 25791 - protein, 11 aa, Homo sapiens
  AACR GENIE Results; NRAS_p.G13D; A6801
LVVVGAGDVGK

SEQ ID NO: 25792 - protein, 10 aa, Homo sapiens
  AACR GENIE Results; NRAS_p.G13D; B1302
GDVGKSALTI

SEQ ID NO: 25793 - protein, 10 aa, Homo sapiens
  AACR GENIE Results; NRAS_p.G13D; B0702
GAGDVGKSAL

SEQ ID NO: 25794 - protein, 9 aa, Homo sapiens
  AACR GENIE Results; NRAS_p.G13D; C0304
AGDVGKSAL

SEQ ID NO: 25795 - protein, 9 aa, Homo sapiens
  AACR GENIE Results; NRAS_p.G13D; A6801
VVGAGDVGK

SEQ ID NO: 25796 - protein, 10 aa, Homo sapiens
  AACR GENIE Results; NRAS_p.G13D; A6802
VVVGAGDVGK

SEQ ID NO: 25797 - protein, 11 aa, Homo sapiens
  AACR GENIE Results; NRAS_p.G13D; A1101
LVVVGAGDVGK

SEQ ID NO: 25798 - protein, 9 aa, Homo sapiens
  AACR GENIE Results; NRAS_p.G13D; B3502
AGDVGKSAL

SEQ ID NO: 25799 - protein, 11 aa, Homo sapiens
  AACR GENIE Results; NRAS_p.G13D; A2601
VVVGAGDVGKS

SEQ ID NO: 25800 - protein, 11 aa, Homo sapiens
  AACR GENIE Results; NRAS_p.G13D; B0801
VGAGDVGKSAL

SEQ ID NO: 25801 - protein, 11 aa, Homo sapiens
  AACR GENIE Results; NRAS_p.G13R; A3303
EYKLVVVGAGR

SEQ ID NO: 25802 - protein, 10 aa, Homo sapiens
  AACR GENIE Results; NRAS_p.G13R; A1101
VVVGAGRVGK

SEQ ID NO: 25803 - protein, 9 aa, Homo sapiens
  AACR GENIE Results; NRAS_p.G13R; A1101
VVGAGRVGK

SEQ ID NO: 25804 - protein, 10 aa, Homo sapiens
  AACR GENIE Results; NRAS_p.G13R; A0301
VVVGAGRVGK

SEQ ID NO: 25805 - protein, 9 aa, Homo sapiens
  AACR GENIE Results; NRAS_p.G13R; B0702
AGRVGKSAL

SEQ ID NO: 25806 - protein, 10 aa, Homo sapiens
  AACR GENIE Results; NRAS_p.G13R; A6801
VVVGAGRVGK

SEQ ID NO: 25807 - protein, 9 aa, Homo sapiens
  AACR GENIE Results; NRAS_p.G13R; A0301
VVGAGRVGK

SEQ ID NO: 25808 - protein, 9 aa, Homo sapiens
  AACR GENIE Results; NRAS_p.G13R; A3101
KLVVVGAGR

SEQ ID NO: 25809 - protein, 9 aa, Homo sapiens
  AACR GENIE Results; NRAS_p.G13R; B1302
RVGKSALTI

SEQ ID NO: 25810 - protein, 9 aa, Homo sapiens
  AACR GENIE Results; NRAS_p.G13R; B0801
AGRVGKSAL

SEQ ID NO: 25811 - protein, 10 aa, Homo sapiens
  AACR GENIE Results; NRAS_p.G13R; B5701
VVVGAGRVGK

SEQ ID NO: 25812 - protein, 10 aa, Homo sapiens
  AACR GENIE Results; NRAS_p.Q61H; A0101
ILDTAGHEEY

SEQ ID NO: 25813 - protein, 10 aa, Homo sapiens
  AACR GENIE Results; NRAS_p.Q61H; B1501
ILDTAGHEEY

SEQ ID NO: 25814 - protein, 11 aa, Homo sapiens
  AACR GENIE Results; NRAS_p.Q61H; B3501
DILDTAGHEEY

SEQ ID NO: 25815 - protein, 11 aa, Homo sapiens
  AACR GENIE Results; NRAS_p.Q61H; A2601
DTAGHEEYSAM

SEQ ID NO: 25816 - protein, 11 aa, Homo sapiens
  AACR GENIE Results; NRAS_p.Q61H; A2601
DILDTAGHEEY

SEQ ID NO: 25817 - protein, 11 aa, Homo sapiens
  AACR GENIE Results; NRAS_p.Q61H; B2702
DILDTAGHEEY

SEQ ID NO: 25818 - protein, 9 aa, Homo sapiens
  AACR GENIE Results; NRAS_p.Q61H; B3501
LDTAGHEEY

SEQ ID NO: 25819 - protein, 10 aa, Homo sapiens
  AACR GENIE Results; NRAS_p.Q61H; A2902
ILDTAGHEEY

SEQ ID NO: 25820 - protein, 10 aa, Homo sapiens
  AACR GENIE Results; NRAS_p.Q61H; B3901
ILDTAGHEEY

SEQ ID NO: 25821 - protein, 10 aa, Homo sapiens
  AACR GENIE Results; NRAS_p.Q61H; B3501
ILDTAGHEEY

SEQ ID NO: 25822 - protein, 9 aa, Homo sapiens
  AACR GENIE Results; NRAS_p.Q61H; B1801
LDTAGHEEY

SEQ ID NO: 25823 - protein, 8 aa, Homo sapiens
  AACR GENIE Results; NRAS_p.Q61H; A2601
DTAGHEEY

SEQ ID NO: 25824 - protein, 10 aa, Homo sapiens
  AACR GENIE Results; NRAS_p.Q61H; C0802
ILDTAGHEEY

SEQ ID NO: 25825 - protein, 9 aa, Homo sapiens
  AACR GENIE Results; NRAS_p.Q61H; B2702
LDTAGHEEY

SEQ ID NO: 25826 - protein, 10 aa, Homo sapiens
  AACR GENIE Results; NRAS_p.Q61H; B2702
ILDTAGHEEY

SEQ ID NO: 25827 - protein, 9 aa, Homo sapiens
  AACR GENIE Results; NRAS_p.Q61H; A0101
LDTAGHEEY

SEQ ID NO: 25828 - protein, 11 aa, Homo sapiens
  AACR GENIE Results; NRAS_p.Q61H; A2902
DILDTAGHEEY

SEQ ID NO: 25829 - protein, 9 aa, Homo sapiens
  AACR GENIE Results; NRAS_p.Q61H; B1501
LDTAGHEEY

SEQ ID NO: 25830 - protein, 11 aa, Homo sapiens
  AACR GENIE Results; NRAS_p.Q61H; B0801
DILDTAGHEEY

SEQ ID NO: 25831 - protein, 11 aa, Homo sapiens
  AACR GENIE Results; NRAS_p.Q61H; B1501
DILDTAGHEEY

SEQ ID NO: 25832 - protein, 11 aa, Homo sapiens
  AACR GENIE Results; NRAS_p.Q61H; A6801
DILDTAGHEEY

SEQ ID NO: 25833 - protein, 8 aa, Homo sapiens
  AACR GENIE Results; NRAS_p.Q61H; B3901
DTAGHEEY

SEQ ID NO: 25834 - protein, 10 aa, Homo sapiens
  AACR GENIE Results; NRAS_p.Q61K; A0101
ILDTAGKEEY

SEQ ID NO: 25835 - protein, 10 aa, Homo sapiens
  AACR GENIE Results; NRAS_p.Q61K; C0302
ILDTAGKEEY

SEQ ID NO: 25836 - protein, 10 aa, Homo sapiens
  AACR GENIE Results; NRAS_p.Q61K; B1501
ILDTAGKEEY

SEQ ID NO: 25837 - protein, 11 aa, Homo sapiens
  AACR GENIE Results; NRAS_p.Q61K; A2601
DTAGKEEYSAM

SEQ ID NO: 25838 - protein, 10 aa, Homo sapiens
  AACR GENIE Results; NRAS_p.Q61K; B5801
ILDTAGKEEY

SEQ ID NO: 25839 - protein, 10 aa, Homo sapiens
  AACR GENIE Results; NRAS_p.Q61K; B4601
ILDTAGKEEY

SEQ ID NO: 25840 - protein, 11 aa, Homo sapiens
  AACR GENIE Results; NRAS_p.Q61K; B3501
DILDTAGKEEY

SEQ ID NO: 25841 - protein, 10 aa, Homo sapiens
  AACR GENIE Results; NRAS_p.Q61K; B3901
ILDTAGKEEY

SEQ ID NO: 25842 - protein, 11 aa, Homo sapiens
  AACR GENIE Results; NRAS_p.Q61K; A2601
DILDTAGKEEY

SEQ ID NO: 25843 - protein, 9 aa, Homo sapiens
  AACR GENIE Results; NRAS_p.Q61K; B2702
LDILDTAGK

SEQ ID NO: 25844 - protein, 10 aa, Homo sapiens
  AACR GENIE Results; NRAS_p.Q61K; C0801
ILDTAGKEEY

SEQ ID NO: 25845 - protein, 10 aa, Homo sapiens
  AACR GENIE Results; NRAS_p.Q61K; B3501
ILDTAGKEEY

SEQ ID NO: 25846 - protein, 10 aa, Homo sapiens
  AACR GENIE Results; NRAS_p.Q61K; B3501
TAGKEEYSAM

SEQ ID NO: 25847 - protein, 10 aa, Homo sapiens
  AACR GENIE Results; NRAS_p.Q61K; B2702
LLDILDTAGK

SEQ ID NO: 25848 - protein, 10 aa, Homo sapiens
  AACR GENIE Results; NRAS_p.Q61K; B3503
TAGKEEYSAM

SEQ ID NO: 25849 - protein, 10 aa, Homo sapiens
  AACR GENIE Results; NRAS_p.Q61K; A2902
ILDTAGKEEY

SEQ ID NO: 25850 - protein, 9 aa, Homo sapiens
  AACR GENIE Results; NRAS_p.Q61K; B3501
LDTAGKEEY

SEQ ID NO: 25851 - protein, 11 aa, Homo sapiens
  AACR GENIE Results; NRAS_p.Q61K; B2702
DILDTAGKEEY

SEQ ID NO: 25852 - protein, 10 aa, Homo sapiens
  AACR GENIE Results; NRAS_p.Q61K; B3502
TAGKEEYSAM

SEQ ID NO: 25853 - protein, 9 aa, Homo sapiens
  AACR GENIE Results; NRAS_p.Q61K; B1501
AGKEEYSAM

SEQ ID NO: 25854 - protein, 10 aa, Homo sapiens
  AACR GENIE Results; NRAS_p.Q61K; A3002
ILDTAGKEEY

SEQ ID NO: 25855 - protein, 10 aa, Homo sapiens
  AACR GENIE Results; NRAS_p.Q61K; A2901
ILDTAGKEEY

SEQ ID NO: 25856 - protein, 11 aa, Homo sapiens
  AACR GENIE Results; NRAS_p.Q61K; B1501
DILDTAGKEEY

SEQ ID NO: 25857 - protein, 9 aa, Homo sapiens
  AACR GENIE Results; NRAS_p.Q61K; B3502
TAGKEEYSA

SEQ ID NO: 25858 - protein, 10 aa, Homo sapiens
  AACR GENIE Results; NRAS_p.Q61K; C0802
ILDTAGKEEY

SEQ ID NO: 25859 - protein, 10 aa, Homo sapiens
  AACR GENIE Results; NRAS_p.Q61L; A0101
ILDTAGLEEY

SEQ ID NO: 25860 - protein, 11 aa, Homo sapiens
  AACR GENIE Results; NRAS_p.Q61L; A2601
DTAGLEEYSAM

SEQ ID NO: 25861 - protein, 11 aa, Homo sapiens
  AACR GENIE Results; NRAS_p.Q61L; B3501
DILDTAGLEEY

SEQ ID NO: 25862 - protein, 10 aa, Homo sapiens
  AACR GENIE Results; NRAS_p.Q61L; B1501
ILDTAGLEEY

SEQ ID NO: 25863 - protein, 11 aa, Homo sapiens
  AACR GENIE Results; NRAS_p.Q61L; A2601
DILDTAGLEEY

SEQ ID NO: 25864 - protein, 10 aa, Homo sapiens
  AACR GENIE Results; NRAS_p.Q61L; B3901
ILDTAGLEEY

SEQ ID NO: 25865 - protein, 8 aa, Homo sapiens
  AACR GENIE Results; NRAS_p.Q61L; A2601
DTAGLEEY

SEQ ID NO: 25866 - protein, 9 aa, Homo sapiens
  AACR GENIE Results; NRAS_p.Q61L; B3501
LDTAGLEEY

SEQ ID NO: 25867 - protein, 11 aa, Homo sapiens
  AACR GENIE Results; NRAS_p.Q61L; B2702
DILDTAGLEEY

SEQ ID NO: 25868 - protein, 10 aa, Homo sapiens
  AACR GENIE Results; NRAS_p.Q61L; B3501
ILDTAGLEEY

SEQ ID NO: 25869 - protein, 10 aa, Homo sapiens
  AACR GENIE Results; NRAS_p.Q61L; B3501
TAGLEEYSAM

SEQ ID NO: 25870 - protein, 9 aa, Homo sapiens
  AACR GENIE Results; NRAS_p.Q61L; B1801
LDTAGLEEY

SEQ ID NO: 25871 - protein, 10 aa, Homo sapiens
  AACR GENIE Results; NRAS_p.Q61L; A2902
ILDTAGLEEY

SEQ ID NO: 25872 - protein, 10 aa, Homo sapiens
  AACR GENIE Results; NRAS_p.Q61L; B2702
ILDTAGLEEY

SEQ ID NO: 25873 - protein, 10 aa, Homo sapiens
  AACR GENIE Results; NRAS_p.Q61L; A0201
ILDTAGLEEY

SEQ ID NO: 25874 - protein, 10 aa, Homo sapiens
  AACR GENIE Results; NRAS_p.Q61L; B3503
TAGLEEYSAM

SEQ ID NO: 25875 - protein, 9 aa, Homo sapiens
  AACR GENIE Results; NRAS_p.Q61L; B4002
LDILDTAGL

SEQ ID NO: 25876 - protein, 11 aa, Homo sapiens
  AACR GENIE Results; NRAS_p.Q61L; B1501
DILDTAGLEEY

SEQ ID NO: 25877 - protein, 11 aa, Homo sapiens
  AACR GENIE Results; NRAS_p.Q61L; A6801
DTAGLEEYSAM

SEQ ID NO: 25878 - protein, 10 aa, Homo sapiens
  AACR GENIE Results; NRAS_p.Q61L; A6801
DTAGLEEYSA

SEQ ID NO: 25879 - protein, 11 aa, Homo sapiens
  AACR GENIE Results; NRAS_p.Q61L; A2902
DILDTAGLEEY

SEQ ID NO: 25880 - protein, 10 aa, Homo sapiens
  AACR GENIE Results; NRAS_p.Q61R; A0101
ILDTAGREEY

SEQ ID NO: 25881 - protein, 10 aa, Homo sapiens
  AACR GENIE Results; NRAS_p.Q61R; C0302
ILDTAGREEY

SEQ ID NO: 25882 - protein, 10 aa, Homo sapiens
  AACR GENIE Results; NRAS_p.Q61R; B1501
ILDTAGREEY

SEQ ID NO: 25883 - protein, 10 aa, Homo sapiens
  AACR GENIE Results; NRAS_p.Q61R; B5801
ILDTAGREEY

SEQ ID NO: 25884 - protein, 11 aa, Homo sapiens
  AACR GENIE Results; NRAS_p.Q61R; B3501
DILDTAGREEY

SEQ ID NO: 25885 - protein, 11 aa, Homo sapiens
  AACR GENIE Results; NRAS_p.Q61R; A2601
DILDTAGREEY

SEQ ID NO: 25886 - protein, 10 aa, Homo sapiens
  AACR GENIE Results; NRAS_p.Q61R; B2702
ILDTAGREEY

SEQ ID NO: 25887 - protein, 11 aa, Homo sapiens
  AACR GENIE Results; NRAS_p.Q61R; A2601
DTAGREEYSAM

SEQ ID NO: 25888 - protein, 10 aa, Homo sapiens
  AACR GENIE Results; NRAS_p.Q61R; B3901
ILDTAGREEY

SEQ ID NO: 25889 - protein, 10 aa, Homo sapiens
  AACR GENIE Results; NRAS_p.Q61R; A2902
ILDTAGREEY

SEQ ID NO: 25890 - protein, 9 aa, Homo sapiens
  AACR GENIE Results; NRAS_p.Q61R; B2702
LDILDTAGR

SEQ ID NO: 25891 - protein, 10 aa, Homo sapiens
  AACR GENIE Results; NRAS_p.Q61R; A3002
ILDTAGREEY

SEQ ID NO: 25892 - protein, 11 aa, Homo sapiens
  AACR GENIE Results; NRAS_p.Q61R; B2702
DILDTAGREEY

SEQ ID NO: 25893 - protein, 9 aa, Homo sapiens
  AACR GENIE Results; NRAS_p.Q61R; B2705
GREEYSAMR

SEQ ID NO: 25894 - protein, 10 aa, Homo sapiens
  AACR GENIE Results; NRAS_p.Q61R; B3501
ILDTAGREEY

SEQ ID NO: 25895 - protein, 9 aa, Homo sapiens
  AACR GENIE Results; NRAS_p.Q61R; B3501
LDTAGREEY

SEQ ID NO: 25896 - protein, 10 aa, Homo sapiens
  AACR GENIE Results; NRAS_p.Q61R; B3501
TAGREEYSAM

SEQ ID NO: 25897 - protein, 11 aa, Homo sapiens
  AACR GENIE Results; NRAS_p.Q61R; B1501
DILDTAGREEY

SEQ ID NO: 25898 - protein, 10 aa, Homo sapiens
  AACR GENIE Results; NRAS_p.Q61R; B3502
TAGREEYSAM

SEQ ID NO: 25899 - protein, 10 aa, Homo sapiens
  AACR GENIE Results; NRAS_p.Q61R; B3503
TAGREEYSAM

SEQ ID NO: 25900 - protein, 11 aa, Homo sapiens
  AACR GENIE Results; NRAS_p.Q61R; B1801
DILDTAGREEY

SEQ ID NO: 25901 - protein, 10 aa, Homo sapiens
  AACR GENIE Results; NRAS_p.Q61R; B5701
ILDTAGREEY

SEQ ID NO: 25902 - protein, 10 aa, Homo sapiens
  AACR GENIE Results; NRAS_p.Q61R; C0801
ILDTAGREEY

SEQ ID NO: 25903 - protein, 9 aa, Homo sapiens
  AACR GENIE Results; NRAS_p.Q61R; B0702
AGREEYSAM

SEQ ID NO: 25904 - protein, 11 aa, Homo sapiens
  AACR GENIE Results; NTRK1_p.M539I; A0201
NLLPEQDKILV

SEQ ID NO: 25905 - protein, 11 aa, Homo sapiens
  AACR GENIE Results; NTRK1_p.M539I; A0201
LLPEQDKILVA

SEQ ID NO: 25906 - protein, 9 aa, Homo sapiens
  AACR GENIE Results; NTRK1_p.P335L; C0303
FIFTEFLEL

SEQ ID NO: 25907 - protein, 9 aa, Homo sapiens
  AACR GENIE Results; NTRK1_p.P335L; C1502
FIFTEFLEL

SEQ ID NO: 25908 - protein, 9 aa, Homo sapiens
  AACR GENIE Results; NTRK1_p.P335L; C0304
FIFTEFLEL

SEQ ID NO: 25909 - protein, 9 aa, Homo sapiens
  AACR GENIE Results; NTRK1_p.P335L; A6801
ELAANETVR

SEQ ID NO: 25910 - protein, 9 aa, Homo sapiens
  AACR GENIE Results; NTRK1_p.P335L; C0202
FIFTEFLEL

SEQ ID NO: 25911 - protein, 8 aa, Homo sapiens
  AACR GENIE Results; NTRK1_p.R686C; B5701
CTMLPIRW

SEQ ID NO: 25912 - protein, 9 aa, Homo sapiens
  AACR GENIE Results; NTRK1_p.R744H; A1101
ITQGHELER

SEQ ID NO: 25913 - protein, 9 aa, Homo sapiens
  AACR GENIE Results; NTRK1_p.R748W; B5701
ITQGRELEW

SEQ ID NO: 25914 - protein, 8 aa, Homo sapiens
  AACR GENIE Results; NTRK1_p.W514C; B0801
DIVLKCEL

SEQ ID NO: 25915 - protein, 9 aa, Homo sapiens
  AACR GENIE Results; NTRK3_p.D50N; C0602
RRPDNGNLF

SEQ ID NO: 25916 - protein, 9 aa, Homo sapiens
  AACR GENIE Results; NTRK3_p.G666C; B1501
SQIASCMVY

SEQ ID NO: 25917 - protein, 9 aa, Homo sapiens
  AACR GENIE Results; NTRK3_p.G699V; A0301
KIGDFVMSR

SEQ ID NO: 25918 - protein, 9 aa, Homo sapiens
  AACR GENIE Results; NTRK3_p.P304T; A2402
YYTPRVVSL

SEQ ID NO: 25919 - protein, 9 aa, Homo sapiens
  AACR GENIE Results; NTRK3_p.P304T; A0301
TVYYTPRVV

SEQ ID NO: 25920 - protein, 9 aa, Homo sapiens
  AACR GENIE Results; NTRK3_p.P304T; B5101
TVYYTPRVV

SEQ ID NO: 25921 - protein, 9 aa, Homo sapiens
  AACR GENIE Results; NTRK3_p.Q159H; B4403
RELQLEHNF

SEQ ID NO: 25922 - protein, 9 aa, Homo sapiens
  AACR GENIE Results; NTRK3_p.Q159H; B4402
RELQLEHNF

SEQ ID NO: 25923 - protein, 9 aa, Homo sapiens
  AACR GENIE Results; NTRK3_p.Q159H; A2301
RELQLEHNF

SEQ ID NO: 25924 - protein, 10 aa, Homo sapiens
  AACR GENIE Results; NTRK3_p.Q159H; A2301
RELQLEHNFF

SEQ ID NO: 25925 - protein, 10 aa, Homo sapiens
  AACR GENIE Results; NTRK3_p.Q159H; B4403
RELQLEHNFF

SEQ ID NO: 25926 - protein, 9 aa, Homo sapiens
  AACR GENIE Results; NTRK3_p.R306H; A2402
YYPPHVVSL

SEQ ID NO: 25927 - protein, 9 aa, Homo sapiens
  AACR GENIE Results; NTRK3_p.R306H; C0702
YYPPHVVSL

SEQ ID NO: 25928 - protein, 8 aa, Homo sapiens
  AACR GENIE Results; NTRK3_p.R306H; B5101
YPPHVVSL

SEQ ID NO: 25929 - protein, 10 aa, Homo sapiens
  AACR GENIE Results; NTRK3_p.R306H; A2402
VYYPPHVVSL

SEQ ID NO: 25930 - protein, 9 aa, Homo sapiens
  AACR GENIE Results; NTRK3_p.R306H; C1203
TVYYPPHVV

SEQ ID NO: 25931 - protein, 9 aa, Homo sapiens
  AACR GENIE Results; NTRK3_p.R306H; C0401
YYPPHVVSL

SEQ ID NO: 25932 - protein, 9 aa, Homo sapiens
  AACR GENIE Results; NTRK3_p.R306H; B5101
TVYYPPHVV

SEQ ID NO: 25933 - protein, 9 aa, Homo sapiens
  AACR GENIE Results; NTRK3_p.R306H; C0602
YYPPHVVSL

SEQ ID NO: 25934 - protein, 9 aa, Homo sapiens
  AACR GENIE Results; NTRK3_p.R306H; C0102
YYPPHVVSL

SEQ ID NO: 25935 - protein, 10 aa, Homo sapiens
  AACR GENIE Results; PBRM1_p.I279Yfs*4; B5101
DANSIKKYFI

SEQ ID NO: 25936 - protein, 9 aa, Homo sapiens
  AACR GENIE Results; PBRM1_p.I279Yfs*4; B4403
KDANSIKKY

SEQ ID NO: 25937 - protein, 8 aa, Homo sapiens
  AACR GENIE Results; PBRM1_p.I279Yfs*4; B3501
DANSIKKY

SEQ ID NO: 25938 - protein, 8 aa, Homo sapiens
  AACR GENIE Results; PBRM1_p.I279Yfs*4; B5101
DANSIKKY

SEQ ID NO: 25939 - protein, 8 aa, Homo sapiens
  AACR GENIE Results; PBRM1_p.I279Yfs*4; B1801
DANSIKKY

SEQ ID NO: 25940 - protein, 8 aa, Homo sapiens
  AACR GENIE Results; PBRM1_p.I279Yfs*4; A2601
DANSIKKY

SEQ ID NO: 25941 - protein, 9 aa, Homo sapiens
  AACR GENIE Results; PBRM1_p.I279Yfs*4; B4402
KDANSIKKY

SEQ ID NO: 25942 - protein, 10 aa, Homo sapiens
  AACR GENIE Results; PBRM1_p.R1088W; B5101
VPWDVPLPVV

SEQ ID NO: 25943 - protein, 9 aa, Homo sapiens
  AACR GENIE Results; PBRM1_p.R1088W; B5101
VPWDVPLPV

SEQ ID NO: 25944 - protein, 9 aa, Homo sapiens
  AACR GENIE Results; PBRM1_p.R1088W; B3501
VPWDVPLPV

SEQ ID NO: 25945 - protein, 9 aa, Homo sapiens
  AACR GENIE Results; PBRM1_p.R1088W; B5701
ISSVRFVPW

SEQ ID NO: 25946 - protein, 9 aa, Homo sapiens
  AACR GENIE Results; PBRM1_p.R1088W; A0201
VPWDVPLPV

SEQ ID NO: 25947 - protein, 9 aa, Homo sapiens
  AACR GENIE Results; PBRM1_p.R876C; C1402
FFIKICDEL

SEQ ID NO: 25948 - protein, 8 aa, Homo sapiens
  AACR GENIE Results; PBRM1_p.R876C; B0801
FIKICDEL

SEQ ID NO: 25949 - protein, 8 aa, Homo sapiens
  AACR GENIE Results; PDGFRA_p.E262Q; B4901
QEIKVPSI

SEQ ID NO: 25950 - protein, 10 aa, Homo sapiens
  AACR GENIE Results; PDGFRA_p.E262Q; B4001
QEIKVPSIKL

SEQ ID NO: 25951 - protein, 8 aa, Homo sapiens
  AACR GENIE Results; PDGFRA_p.E262Q; B1801
QEIKVPSI

SEQ ID NO: 25952 - protein, 9 aa, Homo sapiens
  AACR GENIE Results; PDGFRA_p.E262Q; B1302
LQEIKVPSI

SEQ ID NO: 25953 - protein, 10 aa, Homo sapiens
  AACR GENIE Results; PDGFRA_p.E262Q; B4403
QEIKVPSIKL

SEQ ID NO: 25954 - protein, 10 aa, Homo sapiens
  AACR GENIE Results; PDGFRA_p.E262Q; A3001
QEIKVPSIKL

SEQ ID NO: 25955 - protein, 8 aa, Homo sapiens
  AACR GENIE Results; PDGFRA_p.E262Q; B1302
QEIKVPSI

SEQ ID NO: 25956 - protein, 8 aa, Homo sapiens
  AACR GENIE Results; PDGFRA_p.E262Q; A3001
QEIKVPSI

SEQ ID NO: 25957 - protein, 10 aa, Homo sapiens
  AACR GENIE Results; PDGFRA_p.E262Q; A0201
MLQEIKVPSI

SEQ ID NO: 25958 - protein, 9 aa, Homo sapiens
  AACR GENIE Results; PDGFRA_p.E262Q; B1302
KGITMLQEI

SEQ ID NO: 25959 - protein, 8 aa, Homo sapiens
  AACR GENIE Results; PDGFRA_p.E262Q; A2301
QEIKVPSI

SEQ ID NO: 25960 - protein, 8 aa, Homo sapiens
  AACR GENIE Results; PDGFRA_p.E262Q; B5101
QEIKVPSI

SEQ ID NO: 25961 - protein, 8 aa, Homo sapiens
  AACR GENIE Results; PDGFRA_p.E262Q; B1302
GITMLQEI

SEQ ID NO: 25962 - protein, 11 aa, Homo sapiens
  AACR GENIE Results; PDGFRA_p.E262Q; A0201
TMLQEIKVPSI

SEQ ID NO: 25963 - protein, 9 aa, Homo sapiens
  AACR GENIE Results; PDGFRA_p.F182L; B5101
QGFNGTLTV

SEQ ID NO: 25964 - protein, 9 aa, Homo sapiens
  AACR GENIE Results; PDGFRA_p.F182L; B3501
NGTLTVGPY

SEQ ID NO: 25965 - protein, 9 aa, Homo sapiens
  AACR GENIE Results; PDGFRA_p.F182L; C1203
QGFNGTLTV

SEQ ID NO: 25966 - protein, 9 aa, Homo sapiens
  AACR GENIE Results; PDGFRA_p.P6L; A6802
GTSHLAFLV

SEQ ID NO: 25967 - protein, 9 aa, Homo sapiens
  AACR GENIE Results; PDGFRA_p.P6L; C1502
TSHLAFLVL

SEQ ID NO: 25968 - protein, 8 aa, Homo sapiens
  AACR GENIE Results; PDGFRA_p.P6L; A6802
TSHLAFLV

SEQ ID NO: 25969 - protein, 9 aa, Homo sapiens
  AACR GENIE Results; PDGFRA_p.P6L; C1601
TSHLAFLVL

SEQ ID NO: 25970 - protein, 8 aa, Homo sapiens
  AACR GENIE Results; PDGFRA_p.P6L; B5101
TSHLAFLV

SEQ ID NO: 25971 - protein, 9 aa, Homo sapiens
  AACR GENIE Results; PDGFRA_p.P6L; B5701
GTSHLAFLV

SEQ ID NO: 25972 - protein, 9 aa, Homo sapiens
  AACR GENIE Results; PDGFRA_p.P6L; C0303
TSHLAFLVL

SEQ ID NO: 25973 - protein, 8 aa, Homo sapiens
  AACR GENIE Results; PDGFRA_p.P6L; B1302
TSHLAFLV

SEQ ID NO: 25974 - protein, 9 aa, Homo sapiens
  AACR GENIE Results; PDGFRA_p.P6L; B5801
GTSHLAFLV

SEQ ID NO: 25975 - protein, 9 aa, Homo sapiens
  AACR GENIE Results; PDGFRA_p.P6L; C0304
TSHLAFLVL

SEQ ID NO: 25976 - protein, 10 aa, Homo sapiens
  AACR GENIE Results; PDGFRA_p.P6L; A6802
GTSHLAFLVL

SEQ ID NO: 25977 - protein, 8 aa, Homo sapiens
  AACR GENIE Results; PDGFRA_p.R340W; B5101
WAYPPPRI

SEQ ID NO: 25978 - protein, 10 aa, Homo sapiens
  AACR GENIE Results; PDGFRA_p.R340W; B5701
WAYPPPRISW

SEQ ID NO: 25979 - protein, 9 aa, Homo sapiens
  AACR GENIE Results; PDGFRA_p.R340W; A2902
HFVVEVWAY

SEQ ID NO: 25980 - protein, 8 aa, Homo sapiens
  AACR GENIE Results; PDGFRA_p.R340W; B5701
KHFVVEVW

SEQ ID NO: 25981 - protein, 9 aa, Homo sapiens
  AACR GENIE Results; PDGFRB_p.G126D; C0401
VPDPTVDFL

SEQ ID NO: 25982 - protein, 9 aa, Homo sapiens
  AACR GENIE Results; PDGFRB_p.G126D; C0802
VPDPTVDFL

SEQ ID NO: 25983 - protein, 9 aa, Homo sapiens
  AACR GENIE Results; PDGFRB_p.G126D; B3501
VPDPTVDFL

SEQ ID NO: 25984 - protein, 9 aa, Homo sapiens
  AACR GENIE Results; PDGFRB_p.G126D; C0501
VPDPTVDFL

SEQ ID NO: 25985 - protein, 10 aa, Homo sapiens
  AACR GENIE Results; PDGFRB_p.G126D; A2402
IFVPDPTVDF

SEQ ID NO: 25986 - protein, 9 aa, Homo sapiens
  AACR GENIE Results; PDGFRB_p.G126D; B3501
FVPDPTVDF

SEQ ID NO: 25987 - protein, 10 aa, Homo sapiens
  AACR GENIE Results; PDGFRB_p.G126D; C0102
FVPDPTVDFL

SEQ ID NO: 25988 - protein, 8 aa, Homo sapiens
  AACR GENIE Results; PDGFRB_p.G126D; B3501
VPDPTVDF

SEQ ID NO: 25989 - protein, 9 aa, Homo sapiens
  AACR GENIE Results; PDGFRB_p.G126D; C0102
FVPDPTVDF

SEQ ID NO: 25990 - protein, 9 aa, Homo sapiens
  AACR GENIE Results; PDGFRB_p.R113Q; B4403
LETDEQKRL

SEQ ID NO: 25991 - protein, 9 aa, Homo sapiens
  AACR GENIE Results; PDGFRB_p.R113Q; A2601
ETDEQKRLY

SEQ ID NO: 25992 - protein, 9 aa, Homo sapiens
  AACR GENIE Results; PDGFRB_p.R113Q; A0101
ETDEQKRLY

SEQ ID NO: 25993 - protein, 10 aa, Homo sapiens
  AACR GENIE Results; PDGFRB_p.R113Q; B4403
LETDEQKRLY

SEQ ID NO: 25994 - protein, 9 aa, Homo sapiens
  AACR GENIE Results; PDGFRB_p.R113Q; B4001
LETDEQKRL

SEQ ID NO: 25995 - protein, 10 aa, Homo sapiens
  AACR GENIE Results; PDGFRB_p.R113Q; B4402
LETDEQKRLY

SEQ ID NO: 25996 - protein, 9 aa, Homo sapiens
  AACR GENIE Results; PDGFRB_p.R113Q; A2301
DEQKRLYIF

SEQ ID NO: 25997 - protein, 9 aa, Homo sapiens
  AACR GENIE Results; PDGFRB_p.R113Q; B4402
LETDEQKRL

SEQ ID NO: 25998 - protein, 9 aa, Homo sapiens
  AACR GENIE Results; PDGFRB_p.R376W; B4001
SETWYVSEL

SEQ ID NO: 25999 - protein, 9 aa, Homo sapiens
  AACR GENIE Results; PDGFRB_p.R376W; B4403
SETWYVSEL

SEQ ID NO: 26000 - protein, 10 aa, Homo sapiens
  AACR GENIE Results; PHOX2B_p.R102C; A1101
CTTFTSAQLK

SEQ ID NO: 26001 - protein, 11 aa, Homo sapiens
  AACR GENIE Results; PIK3C2B_p.R21H; A0301
KSLESVGISHK

SEQ ID NO: 26002 - protein, 11 aa, Homo sapiens
  AACR GENIE Results; PIK3C2B_p.R21H; A1101
KSLESVGISHK

SEQ ID NO: 26003 - protein, 8 aa, Homo sapiens
  AACR GENIE Results; PIK3C2B_p.R21H; B1801
LESVGISH

SEQ ID NO: 26004 - protein, 10 aa, Homo sapiens
  AACR GENIE Results; PIK3C2B_p.R21H; A0301
KSLESVGISH

SEQ ID NO: 26005 - protein, 9 aa, Homo sapiens
  AACR GENIE Results; PIK3C2B_p.R938C; C0501
YLDSPLVCF

SEQ ID NO: 26006 - protein, 9 aa, Homo sapiens
  AACR GENIE Results; PIK3C2B_p.R938C; C0802
YLDSPLVCF

SEQ ID NO: 26007 - protein, 9 aa, Homo sapiens
  AACR GENIE Results; PIK3C2B_p.S796R; C0202
FTRPPGDKF

SEQ ID NO: 26008 - protein, 10 aa, Homo sapiens
  AACR GENIE Results; PIK3C2G_p.R738C; A1101
SSFPDQEICK

SEQ ID NO: 26009 - protein, 9 aa, Homo sapiens
  AACR GENIE Results; PIK3C2G_p.R738C; B5101
FPDQEICKV

SEQ ID NO: 26010 - protein, 9 aa, Homo sapiens
  AACR GENIE Results; PIK3C2G_p.R738C; C0501
FPDQEICKV

SEQ ID NO: 26011 - protein, 9 aa, Homo sapiens
  AACR GENIE Results; PIK3CA_p.C420R; B4403
KEEHRPLAW

SEQ ID NO: 26012 - protein, 8 aa, Homo sapiens
  AACR GENIE Results; PIK3CA_p.C420R; B4403
EEHRPLAW

SEQ ID NO: 26013 - protein, 9 aa, Homo sapiens
  AACR GENIE Results; PIK3CA_p.C901F; C0802
AIDLFTRSF

SEQ ID NO: 26014 - protein, 10 aa, Homo sapiens
  AACR GENIE Results; PIK3CA_p.C901F; B5701
AAIDLFTRSF

SEQ ID NO: 26015 - protein, 10 aa, Homo sapiens
  AACR GENIE Results; PIK3CA_p.C901F; C1601
AAIDLFTRSF

SEQ ID NO: 26016 - protein, 10 aa, Homo sapiens
  AACR GENIE Results; PIK3CA_p.C901F; A2301
SFAGYCVATF

SEQ ID NO: 26017 - protein, 9 aa, Homo sapiens
  AACR GENIE Results; PIK3CA_p.C901F; C0401
AIDLFTRSF

SEQ ID NO: 26018 - protein, 9 aa, Homo sapiens
  AACR GENIE Results; PIK3CA_p.C901F; C0501
AIDLFTRSF

SEQ ID NO: 26019 - protein, 11 aa, Homo sapiens
  AACR GENIE Results; PIK3CA_p.E110del; A1101
KVIEPVGNREK

SEQ ID NO: 26020 - protein, 11 aa, Homo sapiens
  AACR GENIE Results; PIK3CA_p.E110del; A0301
KVIEPVGNREK

SEQ ID NO: 26021 - protein, 10 aa, Homo sapiens
  AACR GENIE Results; PIK3CA_p.E110del; A0301
VIEPVGNREK

SEQ ID NO: 26022 - protein, 10 aa, Homo sapiens
  AACR GENIE Results; PIK3CA_p.E110del; A1101
VIEPVGNREK

SEQ ID NO: 26023 - protein, 9 aa, Homo sapiens
  AACR GENIE Results; PIK3CA_p.E453K; A3001
KDLLNPIGV

SEQ ID NO: 26024 - protein, 9 aa, Homo sapiens
  AACR GENIE Results; PIK3CA_p.E453K; A0201
KDLLNPIGV

SEQ ID NO: 26025 - protein, 11 aa, Homo sapiens
  AACR GENIE Results; PIK3CA_p.E453Q; A0201
GLQDLLNPIGV

SEQ ID NO: 26026 - protein, 11 aa, Homo sapiens
  AACR GENIE Results; PIK3CA_p.E542K; B5701
KITEQEKDFLW

SEQ ID NO: 26027 - protein, 11 aa, Homo sapiens
  AACR GENIE Results; PIK3CA_p.E542K; A3101
STRDPLSKITE

SEQ ID NO: 26028 - protein, 9 aa, Homo sapiens
  AACR GENIE Results; PIK3CA_p.E542K; B5701
STRDPLSKI

SEQ ID NO: 26029 - protein, 9 aa, Homo sapiens
  AACR GENIE Results; PIK3CA_p.E542K; A0203
STRDPLSKI

SEQ ID NO: 26030 - protein, 9 aa, Homo sapiens
  AACR GENIE Results; PIK3CA_p.E542K; A3001
STRDPLSKI

SEQ ID NO: 26031 - protein, 9 aa, Homo sapiens
  AACR GENIE Results; PIK3CA_p.E542V; C1502
ISTRDPLSV

SEQ ID NO: 26032 - protein, 9 aa, Homo sapiens
  AACR GENIE Results; PIK3CA_p.E542V; B5701
STRDPLSVI

SEQ ID NO: 26033 - protein, 9 aa, Homo sapiens
  AACR GENIE Results; PIK3CA_p.E542V; B0702
STRDPLSVI

SEQ ID NO: 26034 - protein, 11 aa, Homo sapiens
  AACR GENIE Results; PIK3CA_p.E542V; B5701
VITEQEKDFLW

SEQ ID NO: 26035 - protein, 9 aa, Homo sapiens
  AACR GENIE Results; PIK3CA_p.E542V; B1302
ISTRDPLSV

SEQ ID NO: 26036 - protein, 8 aa, Homo sapiens
  AACR GENIE Results; PIK3CA_p.E542V; C1502
STRDPLSV

SEQ ID NO: 26037 - protein, 10 aa, Homo sapiens
  AACR GENIE Results; PIK3CA_p.E545A; B4403
SEITAQEKDF

SEQ ID NO: 26038 - protein, 10 aa, Homo sapiens
  AACR GENIE Results; PIK3CA_p.E545A; B5701
ITAQEKDFLW

SEQ ID NO: 26039 - protein, 11 aa, Homo sapiens
  AACR GENIE Results; PIK3CA_p.E545A; B4001
SEITAQEKDFL

SEQ ID NO: 26040 - protein, 10 aa, Homo sapiens
  AACR GENIE Results; PIK3CA_p.E545A; B4402
SEITAQEKDF

SEQ ID NO: 26041 - protein, 9 aa, Homo sapiens
  AACR GENIE Results; PIK3CA_p.E545A; B5701
TAQEKDFLW

SEQ ID NO: 26042 - protein, 11 aa, Homo sapiens
  AACR GENIE Results; PIK3CA_p.E545A; B4002
SEITAQEKDFL

SEQ ID NO: 26043 - protein, 8 aa, Homo sapiens
  AACR GENIE Results; PIK3CA_p.E545A; B3502
DPLSEITA

SEQ ID NO: 26044 - protein, 9 aa, Homo sapiens
  AACR GENIE Results; PIK3CA_p.E545A; A0205
ITAQEKDFL

SEQ ID NO: 26045 - protein, 9 aa, Homo sapiens
  AACR GENIE Results; PIK3CA_p.E545A; B3906
RDPLSEITA

SEQ ID NO: 26046 - protein, 10 aa, Homo sapiens
  AACR GENIE Results; PIK3CA_p.E545D; B4403
SEITDQEKDF

SEQ ID NO: 26047 - protein, 10 aa, Homo sapiens
  AACR GENIE Results; PIK3CA_p.E545D; B4402
SEITDQEKDF

SEQ ID NO: 26048 - protein, 11 aa, Homo sapiens
  AACR GENIE Results; PIK3CA_p.E545D; B4001
SEITDQEKDFL

SEQ ID NO: 26049 - protein, 10 aa, Homo sapiens
  AACR GENIE Results; PIK3CA_p.E545D; B5701
ITDQEKDFLW

SEQ ID NO: 26050 - protein, 9 aa, Homo sapiens
  AACR GENIE Results; PIK3CA_p.E545D; C0802
ITDQEKDFL

SEQ ID NO: 26051 - protein, 9 aa, Homo sapiens
  AACR GENIE Results; PIK3CA_p.E545D; C0501
ITDQEKDFL

SEQ ID NO: 26052 - protein, 10 aa, Homo sapiens
  AACR GENIE Results; PIK3CA_p.E545G; B4403
SEITGQEKDF

SEQ ID NO: 26053 - protein, 10 aa, Homo sapiens
  AACR GENIE Results; PIK3CA_p.E545G; B4402
SEITGQEKDF

SEQ ID NO: 26054 - protein, 10 aa, Homo sapiens
  AACR GENIE Results; PIK3CA_p.E545G; B5701
ITGQEKDFLW

SEQ ID NO: 26055 - protein, 11 aa, Homo sapiens
  AACR GENIE Results; PIK3CA_p.E545G; B4001
SEITGQEKDFL

SEQ ID NO: 26056 - protein, 11 aa, Homo sapiens
  AACR GENIE Results; PIK3CA_p.E545G; B4002
SEITGQEKDFL

SEQ ID NO: 26057 - protein, 10 aa, Homo sapiens
  AACR GENIE Results; PIK3CA_p.E545K; B5701
ITKQEKDFLW

SEQ ID NO: 26058 - protein, 11 aa, Homo sapiens
  AACR GENIE Results; PIK3CA_p.E545K; A1101
STRDPLSEITK

SEQ ID NO: 26059 - protein, 11 aa, Homo sapiens
  AACR GENIE Results; PIK3CA_p.E545K; A0302
STRDPLSEITK

SEQ ID NO: 26060 - protein, 10 aa, Homo sapiens
  AACR GENIE Results; PIK3CA_p.E545K; B4403
SEITKQEKDF

SEQ ID NO: 26061 - protein, 10 aa, Homo sapiens
  AACR GENIE Results; PIK3CA_p.E545K; B2705
TRDPLSEITK

SEQ ID NO: 26062 - protein, 10 aa, Homo sapiens
  AACR GENIE Results; PIK3CA_p.E545K; B4405
SEITKQEKDF

SEQ ID NO: 26063 - protein, 10 aa, Homo sapiens
  AACR GENIE Results; PIK3CA_p.E545K; B2702
TRDPLSEITK

SEQ ID NO: 26064 - protein, 11 aa, Homo sapiens
  AACR GENIE Results; PIK3CA_p.E545K; A6801
STRDPLSEITK

SEQ ID NO: 26065 - protein, 11 aa, Homo sapiens
  AACR GENIE Results; PIK3CA_p.E545K; A3303
STRDPLSEITK

SEQ ID NO: 26066 - protein, 11 aa, Homo sapiens
  AACR GENIE Results; PIK3CA_p.E545K; A0301
STRDPLSEITK

SEQ ID NO: 26067 - protein, 11 aa, Homo sapiens
  AACR GENIE Results; PIK3CA_p.E545K; A3001
STRDPLSEITK

SEQ ID NO: 26068 - protein, 11 aa, Homo sapiens
  AACR GENIE Results; PIK3CA_p.E545K; A3101
STRDPLSEITK

SEQ ID NO: 26069 - protein, 10 aa, Homo sapiens
  AACR GENIE Results; PIK3CA_p.E545K; B4402
SEITKQEKDF

SEQ ID NO: 26070 - protein, 10 aa, Homo sapiens
  AACR GENIE Results; PIK3CA_p.E545Q; B4403
SEITQQEKDF

SEQ ID NO: 26071 - protein, 10 aa, Homo sapiens
  AACR GENIE Results; PIK3CA_p.E545Q; B5701
ITQQEKDFLW

SEQ ID NO: 26072 - protein, 10 aa, Homo sapiens
  AACR GENIE Results; PIK3CA_p.E545Q; B4402
SEITQQEKDF

SEQ ID NO: 26073 - protein, 11 aa, Homo sapiens
  AACR GENIE Results; PIK3CA_p.E545Q; B4001
SEITQQEKDFL

SEQ ID NO: 26074 - protein, 9 aa, Homo sapiens
  AACR GENIE Results; PIK3CA_p.E726K; B5701
KTQKVQMKF

SEQ ID NO: 26075 - protein, 9 aa, Homo sapiens
  AACR GENIE Results; PIK3CA_p.E726K; B5801
KTQKVQMKF

SEQ ID NO: 26076 - protein, 8 aa, Homo sapiens
  AACR GENIE Results; PIK3CA_p.E726K; B0801
DKTQKVQM

SEQ ID NO: 26077 - protein, 9 aa, Homo sapiens
  AACR GENIE Results; PIK3CA_p.E726K; A3201
KTQKVQMKF

SEQ ID NO: 26078 - protein, 10 aa, Homo sapiens
  AACR GENIE Results; PIK3CA_p.E81K; B5701
VTQEAEREKF

SEQ ID NO: 26079 - protein, 9 aa, Homo sapiens
  AACR GENIE Results; PIK3CA_p.E81K; B4403
QEAEREKFF

SEQ ID NO: 26080 - protein, 9 aa, Homo sapiens
  AACR GENIE Results; PIK3CA_p.E81K; B4402
QEAEREKFF

SEQ ID NO: 26081 - protein, 9 aa, Homo sapiens
  AACR GENIE Results; PIK3CA_p.E81K; C1402
KFFDETRRL

SEQ ID NO: 26082 - protein, 10 aa, Homo sapiens
  AACR GENIE Results; PIK3CA_p.E81K; B5801
VTQEAEREKF

SEQ ID NO: 26083 - protein, 9 aa, Homo sapiens
  AACR GENIE Results; PIK3CA_p.E81K; B3801
TQEAEREKF

SEQ ID NO: 26084 - protein, 9 aa, Homo sapiens
  AACR GENIE Results; PIK3CA_p.E970K; A0301
IVISKGAQK

SEQ ID NO: 26085 - protein, 9 aa, Homo sapiens
  AACR GENIE Results; PIK3CA_p.E970K; A1101
IVISKGAQK

SEQ ID NO: 26086 - protein, 9 aa, Homo sapiens
  AACR GENIE Results; PIK3CA_p.E970K; A6801
IVISKGAQK

SEQ ID NO: 26087 - protein, 9 aa, Homo sapiens
  AACR GENIE Results; PIK3CA_p.E970K; A3001
IVISKGAQK

SEQ ID NO: 26088 - protein, 8 aa, Homo sapiens
  AACR GENIE Results; PIK3CA_p.G1049R; A3303
QMNDAHHR

SEQ ID NO: 26089 - protein, 9 aa, Homo sapiens
  AACR GENIE Results; PIK3CA_p.G1049R; A3101
KQMNDAHHR

SEQ ID NO: 26090 - protein, 9 aa, Homo sapiens
  AACR GENIE Results; PIK3CA_p.G118D; B4901
REIDFAIGM

SEQ ID NO: 26091 - protein, 9 aa, Homo sapiens
  AACR GENIE Results; PIK3CA_p.G118D; B4001
REIDFAIGM

SEQ ID NO: 26092 - protein, 9 aa, Homo sapiens
  AACR GENIE Results; PIK3CA_p.G118D; B4403
REIDFAIGM

SEQ ID NO: 26093 - protein, 9 aa, Homo sapiens
  AACR GENIE Results; PIK3CA_p.G118D; B4402
REIDFAIGM

SEQ ID NO: 26094 - protein, 9 aa, Homo sapiens
  AACR GENIE Results; PIK3CA_p.G118D; A3001
REIDFAIGM

SEQ ID NO: 26095 - protein, 9 aa, Homo sapiens
  AACR GENIE Results; PIK3CA_p.H1047L; A0301
ALHGGWTTK

SEQ ID NO: 26096 - protein, 9 aa, Homo sapiens
  AACR GENIE Results; PIK3CA_p.H1047L; B0801
FMKQMNDAL

SEQ ID NO: 26097 - protein, 10 aa, Homo sapiens
  AACR GENIE Results; PIK3CA_p.H1047L; A6801
DALHGGWTTK

SEQ ID NO: 26098 - protein, 11 aa, Homo sapiens
  AACR GENIE Results; PIK3CA_p.H1047L; B5701
KQMNDALHGGW

SEQ ID NO: 26099 - protein, 8 aa, Homo sapiens
  AACR GENIE Results; PIK3CA_p.H1047L; B3901
MKQMNDAL

SEQ ID NO: 26100 - protein, 9 aa, Homo sapiens
  AACR GENIE Results; PIK3CA_p.H1047R; B2705
ARHGGWTTK

SEQ ID NO: 26101 - protein, 9 aa, Homo sapiens
  AACR GENIE Results; PIK3CA_p.H1047R; A3303
FMKQMNDAR

SEQ ID NO: 26102 - protein, 9 aa, Homo sapiens
  AACR GENIE Results; PIK3CA_p.H1047R; A3101
FMKQMNDAR

SEQ ID NO: 26103 - protein, 9 aa, Homo sapiens
  AACR GENIE Results; PIK3CA_p.H1047Y; B1501
FMKQMNDAY

SEQ ID NO: 26104 - protein, 9 aa, Homo sapiens
  AACR GENIE Results; PIK3CA_p.H1047Y; B5101
DAYHGGWTT

SEQ ID NO: 26105 - protein, 11 aa, Homo sapiens
  AACR GENIE Results; PIK3CA_p.K111N; B4402
EENILNREIGF

SEQ ID NO: 26106 - protein, 11 aa, Homo sapiens
  AACR GENIE Results; PIK3CA_p.K111N; B4403
EENILNREIGF

SEQ ID NO: 26107 - protein, 9 aa, Homo sapiens
  AACR GENIE Results; PIK3CA_p.K111N; B4403
EENILNREI

SEQ ID NO: 26108 - protein, 9 aa, Homo sapiens
  AACR GENIE Results; PIK3CA_p.K111N; B4402
EENILNREI

SEQ ID NO: 26109 - protein, 9 aa, Homo sapiens
  AACR GENIE Results; PIK3CA_p.K111N; B4901
EENILNREI

SEQ ID NO: 26110 - protein, 9 aa, Homo sapiens
  AACR GENIE Results; PIK3CA_p.K111N; B2705
NREENILNR

SEQ ID NO: 26111 - protein, 10 aa, Homo sapiens
  AACR GENIE Results; PIK3CA_p.K111N; B4001
REENILNREI

SEQ ID NO: 26112 - protein, 11 aa, Homo sapiens
  AACR GENIE Results; PIK3CA_p.K111N; B0702
EPVGNREENIL

SEQ ID NO: 26113 - protein, 11 aa, Homo sapiens
  AACR GENIE Results; PIK3CA_p.K111N; A3101
VGNREENILNR

SEQ ID NO: 26114 - protein, 8 aa, Homo sapiens
  AACR GENIE Results; PIK3CA_p.M1043I; B4901
LEYFMKQI

SEQ ID NO: 26115 - protein, 8 aa, Homo sapiens
  AACR GENIE Results; PIK3CA_p.M1043V; B4901
LEYFMKQV

SEQ ID NO: 26116 - protein, 10 aa, Homo sapiens
  AACR GENIE Results; PIK3CA_p.M1043V; A3002
QVNDAHHGGW

SEQ ID NO: 26117 - protein, 10 aa, Homo sapiens
  AACR GENIE Results; PIK3CA_p.M1043V; A3201
QVNDAHHGGW

SEQ ID NO: 26118 - protein, 9 aa, Homo sapiens
  AACR GENIE Results; PIK3CA_p.M1043V; B1501
FMKQVNDAH

SEQ ID NO: 26119 - protein, 8 aa, Homo sapiens
  AACR GENIE Results; PIK3CA_p.M1043V; B5001
LEYFMKQV

SEQ ID NO: 26120 - protein, 10 aa, Homo sapiens
  AACR GENIE Results; PIK3CA_p.M1043V; B5701
QVNDAHHGGW

SEQ ID NO: 26121 - protein, 9 aa, Homo sapiens
  AACR GENIE Results; PIK3CA_p.N345K; A3101
ATYVKLNIR

SEQ ID NO: 26122 - protein, 9 aa, Homo sapiens
  AACR GENIE Results; PIK3CA_p.N345K; B1302
CATYVKLNI

SEQ ID NO: 26123 - protein, 9 aa, Homo sapiens
  AACR GENIE Results; PIK3CA_p.N345K; A3303
ATYVKLNIR

SEQ ID NO: 26124 - protein, 8 aa, Homo sapiens
  AACR GENIE Results; PIK3CA_p.N345K; A3303
TYVKLNIR

SEQ ID NO: 26125 - protein, 9 aa, Homo sapiens
  AACR GENIE Results; PIK3CA_p.Q546H; B4402
TEHEKDFLW

SEQ ID NO: 26126 - protein, 10 aa, Homo sapiens
  AACR GENIE Results; PIK3CA_p.Q546H; B4402
SEITEHEKDF

SEQ ID NO: 26127 - protein, 9 aa, Homo sapiens
  AACR GENIE Results; PIK3CA_p.Q546H; B3501
DPLSEITEH

SEQ ID NO: 26128 - protein, 10 aa, Homo sapiens
  AACR GENIE Results; PIK3CA_p.Q546K; B5701
ITEKEKDFLW

SEQ ID NO: 26129 - protein, 10 aa, Homo sapiens
  AACR GENIE Results; PIK3CA_p.Q546K; B4403
SEITEKEKDF

SEQ ID NO: 26130 - protein, 11 aa, Homo sapiens
  AACR GENIE Results; PIK3CA_p.Q546K; B4001
SEITEKEKDFL

SEQ ID NO: 26131 - protein, 9 aa, Homo sapiens
  AACR GENIE Results; PIK3CA_p.Q546K; B4403
TEKEKDFLW

SEQ ID NO: 26132 - protein, 9 aa, Homo sapiens
  AACR GENIE Results; PIK3CA_p.Q546K; A2301
TEKEKDFLW

SEQ ID NO: 26133 - protein, 8 aa, Homo sapiens
  AACR GENIE Results; PIK3CA_p.Q546K; A1101
PLSEITEK

SEQ ID NO: 26134 - protein, 9 aa, Homo sapiens
  AACR GENIE Results; PIK3CA_p.Q546K; B4402
TEKEKDFLW

SEQ ID NO: 26135 - protein, 10 aa, Homo sapiens
  AACR GENIE Results; PIK3CA_p.Q546K; B4402
SEITEKEKDF

SEQ ID NO: 26136 - protein, 11 aa, Homo sapiens
  AACR GENIE Results; PIK3CA_p.Q546K; B2702
TRDPLSEITEK

SEQ ID NO: 26137 - protein, 9 aa, Homo sapiens
  AACR GENIE Results; PIK3CA_p.Q546K; B5701
TEKEKDFLW

SEQ ID NO: 26138 - protein, 9 aa, Homo sapiens
  AACR GENIE Results; PIK3CA_p.Q546P; B4402
TEPEKDFLW

SEQ ID NO: 26139 - protein, 10 aa, Homo sapiens
  AACR GENIE Results; PIK3CA_p.Q546P; B4402
SEITEPEKDF

SEQ ID NO: 26140 - protein, 10 aa, Homo sapiens
  AACR GENIE Results; PIK3CA_p.Q546R; B4403
SEITEREKDF

SEQ ID NO: 26141 - protein, 9 aa, Homo sapiens
  AACR GENIE Results; PIK3CA_p.Q546R; A3301
DPLSEITER

SEQ ID NO: 26142 - protein, 10 aa, Homo sapiens
  AACR GENIE Results; PIK3CA_p.Q546R; B5701
ITEREKDFLW

SEQ ID NO: 26143 - protein, 9 aa, Homo sapiens
  AACR GENIE Results; PIK3CA_p.Q546R; A3303
DPLSEITER

SEQ ID NO: 26144 - protein, 10 aa, Homo sapiens
  AACR GENIE Results; PIK3CA_p.Q546R; B4402
SEITEREKDF

SEQ ID NO: 26145 - protein, 9 aa, Homo sapiens
  AACR GENIE Results; PIK3CA_p.Q546R; A6801
DPLSEITER

SEQ ID NO: 26146 - protein, 9 aa, Homo sapiens
  AACR GENIE Results; PIK3CA_p.Q546R; B4403
TEREKDFLW

SEQ ID NO: 26147 - protein, 9 aa, Homo sapiens
  AACR GENIE Results; PIK3CA_p.Q546R; B5701
TEREKDFLW

SEQ ID NO: 26148 - protein, 9 aa, Homo sapiens
  AACR GENIE Results; PIK3CA_p.Q546R; A2301
TEREKDFLW

SEQ ID NO: 26149 - protein, 9 aa, Homo sapiens
  AACR GENIE Results; PIK3CA_p.Q546R; B4402
TEREKDFLW

SEQ ID NO: 26150 - protein, 9 aa, Homo sapiens
  AACR GENIE Results; PIK3CA_p.Q546R; B3501
DPLSEITER

SEQ ID NO: 26151 - protein, 9 aa, Homo sapiens
  AACR GENIE Results; PIK3CA_p.Q682H; B0801
EMHNKTVSH

SEQ ID NO: 26152 - protein, 9 aa, Homo sapiens
  AACR GENIE Results; PIK3CA_p.Q75E; B4403
EEAEREEFF

SEQ ID NO: 26153 - protein, 9 aa, Homo sapiens
  AACR GENIE Results; PIK3CA_p.Q75E; B4402
EEAEREEFF

SEQ ID NO: 26154 - protein, 9 aa, Homo sapiens
  AACR GENIE Results; PIK3CA_p.Q75E; B4403
TEEAEREEF

SEQ ID NO: 26155 - protein, 9 aa, Homo sapiens
  AACR GENIE Results; PIK3CA_p.R108H; A1101
KVIEPVGNH

SEQ ID NO: 26156 - protein, 9 aa, Homo sapiens
  AACR GENIE Results; PIK3CA_p.R108H; A0301
KVIEPVGNH

SEQ ID NO: 26157 - protein, 9 aa, Homo sapiens
  AACR GENIE Results; PIK3CA_p.R108H; B1501
KVIEPVGNH

SEQ ID NO: 26158 - protein, 9 aa, Homo sapiens
  AACR GENIE Results; PIK3CA_p.R108H; A3303
NHEEKILNR

SEQ ID NO: 26159 - protein, 11 aa, Homo sapiens
  AACR GENIE Results; PIK3CA_p.R108H; A3101
VGNHEEKILNR

SEQ ID NO: 26160 - protein, 9 aa, Homo sapiens
  AACR GENIE Results; PIK3CA_p.R108H; A2601
KVIEPVGNH

SEQ ID NO: 26161 - protein, 9 aa, Homo sapiens
  AACR GENIE Results; PIK3CA_p.R108H; A6801
NHEEKILNR

SEQ ID NO: 26162 - protein, 9 aa, Homo sapiens
  AACR GENIE Results; PIK3CA_p.R108H; A3101
KVIEPVGNH

SEQ ID NO: 26163 - protein, 9 aa, Homo sapiens
  AACR GENIE Results; PIK3CA_p.R38H; B3801
LHEATLVTI

SEQ ID NO: 26164 - protein, 8 aa, Homo sapiens
  AACR GENIE Results; PIK3CA_p.R38H; B1801
HEATLVTI

SEQ ID NO: 26165 - protein, 8 aa, Homo sapiens
  AACR GENIE Results; PIK3CA_p.R38H; B4001
HEATLVTI

SEQ ID NO: 26166 - protein, 9 aa, Homo sapiens
  AACR GENIE Results; PIK3CA_p.R38H; A0201
VTLECLHEA

SEQ ID NO: 26167 - protein, 8 aa, Homo sapiens
  AACR GENIE Results; PIK3CA_p.R38H; B5101
HEATLVTI

SEQ ID NO: 26168 - protein, 9 aa, Homo sapiens
  AACR GENIE Results; PIK3CA_p.R38H; B4001
LECLHEATL

SEQ ID NO: 26169 - protein, 8 aa, Homo sapiens
  AACR GENIE Results; PIK3CA_p.R88Q; C0401
FFDETRQL

SEQ ID NO: 26170 - protein, 10 aa, Homo sapiens
  AACR GENIE Results; PIK3CA_p.R88Q; B4403
EEFFDETRQL

SEQ ID NO: 26171 - protein, 8 aa, Homo sapiens
  AACR GENIE Results; PIK3CA_p.R88Q; C0802
FFDETRQL

SEQ ID NO: 26172 - protein, 9 aa, Homo sapiens
  AACR GENIE Results; PIK3CA_p.R88Q; C1402
EFFDETRQL

SEQ ID NO: 26173 - protein, 10 aa, Homo sapiens
  AACR GENIE Results; PIK3CA_p.R88Q; B4002
EEFFDETRQL

SEQ ID NO: 26174 - protein, 10 aa, Homo sapiens
  AACR GENIE Results; PIK3CA_p.R88Q; B4402
EEFFDETRQL

SEQ ID NO: 26175 - protein, 8 aa, Homo sapiens
  AACR GENIE Results; PIK3CA_p.R88Q; C1402
FFDETRQL

SEQ ID NO: 26176 - protein, 10 aa, Homo sapiens
  AACR GENIE Results; PIK3CA_p.R88Q; B4001
EEFFDETRQL

SEQ ID NO: 26177 - protein, 9 aa, Homo sapiens
  AACR GENIE Results; PIK3CA_p.R88Q; C0401
FFDETRQLC

SEQ ID NO: 26178 - protein, 8 aa, Homo sapiens
  AACR GENIE Results; PIK3CA_p.R88Q; C0501
FFDETRQL

SEQ ID NO: 26179 - protein, 9 aa, Homo sapiens
  AACR GENIE Results; PIK3CA_p.R88Q; A3303
EFFDETRQL

SEQ ID NO: 26180 - protein, 9 aa, Homo sapiens
  AACR GENIE Results; PIK3CA_p.R88Q; A3303
ETRQLCDLR

SEQ ID NO: 26181 - protein, 9 aa, Homo sapiens
  AACR GENIE Results; PIK3CA_p.T1025A; C1402
AYIRKALAL

SEQ ID NO: 26182 - protein, 8 aa, Homo sapiens
  AACR GENIE Results; PIK3CA_p.T1025A; B0801
IAYIRKAL

SEQ ID NO: 26183 - protein, 9 aa, Homo sapiens
  AACR GENIE Results; PIK3CA_p.T1025A; A2301
AYIRKALAL

SEQ ID NO: 26184 - protein, 8 aa, Homo sapiens
  AACR GENIE Results; PIK3CA_p.T1025A; B1402
IAYIRKAL

SEQ ID NO: 26185 - protein, 9 aa, Homo sapiens
  AACR GENIE Results; PIK3CA_p.T1025A; A2402
AYIRKALAL

SEQ ID NO: 26186 - protein, 8 aa, Homo sapiens
  AACR GENIE Results; PIK3CA_p.T1025A; C0304
IAYIRKAL

SEQ ID NO: 26187 - protein, 8 aa, Homo sapiens
  AACR GENIE Results; PIK3CA_p.T1025A; C1601
IAYIRKAL

SEQ ID NO: 26188 - protein, 9 aa, Homo sapiens
  AACR GENIE Results; PIK3CA_p.V344G; A1101
ATYGNLNIR

SEQ ID NO: 26189 - protein, 9 aa, Homo sapiens
  AACR GENIE Results; PIK3CA_p.V344G; A3101
ATYGNLNIR

SEQ ID NO: 26190 - protein, 9 aa, Homo sapiens
  AACR GENIE Results; PIK3CA_p.V344G; A3303
ATYGNLNIR

SEQ ID NO: 26191 - protein, 9 aa, Homo sapiens
  AACR GENIE Results; PIK3CA_p.V344G; A6801
ATYGNLNIR

SEQ ID NO: 26192 - protein, 9 aa, Homo sapiens
  AACR GENIE Results; PIK3CA_p.V344G; A0301
ATYGNLNIR

SEQ ID NO: 26193 - protein, 8 aa, Homo sapiens
  AACR GENIE Results; PIK3CA_p.V344G; A3303
TYGNLNIR

SEQ ID NO: 26194 - protein, 8 aa, Homo sapiens
  AACR GENIE Results; PIK3CB_p.Q748H; B0801
HSAYREAL

SEQ ID NO: 26195 - protein, 9 aa, Homo sapiens
  AACR GENIE Results; PIK3CG_p.K768N; A1101
QVISQLNQK

SEQ ID NO: 26196 - protein, 9 aa, Homo sapiens
  AACR GENIE Results; PIK3CG_p.K768N; A0301
QVISQLNQK

SEQ ID NO: 26197 - protein, 11 aa, Homo sapiens
  AACR GENIE Results; PIK3CG_p.K768N; A1101
SSQVISQLNQK

SEQ ID NO: 26198 - protein, 10 aa, Homo sapiens
  AACR GENIE Results; PIK3CG_p.K768N; A1101
SQVISQLNQK

SEQ ID NO: 26199 - protein, 9 aa, Homo sapiens
  AACR GENIE Results; PIK3CG_p.K768N; B0801
QLNQKLENL

SEQ ID NO: 26200 - protein, 9 aa, Homo sapiens
  AACR GENIE Results; PIK3R1_p.D560H; B0801
EIHKRMNSI

SEQ ID NO: 26201 - protein, 9 aa, Homo sapiens
  AACR GENIE Results; PIK3R1_p.D560Y; C1601
QAAEYREIY

SEQ ID NO: 26202 - protein, 9 aa, Homo sapiens
  AACR GENIE Results; PIK3R1_p.D560Y; B3501
QAAEYREIY

SEQ ID NO: 26203 - protein, 9 aa, Homo sapiens
  AACR GENIE Results; PIK3R1_p.D560Y; B0801
EIYKRMNSI

SEQ ID NO: 26204 - protein, 9 aa, Homo sapiens
  AACR GENIE Results; PIK3R1_p.D560Y; B1501
QAAEYREIY

SEQ ID NO: 26205 - protein, 9 aa, Homo sapiens
  AACR GENIE Results; PIK3R1_p.D560Y; C1203
QAAEYREIY

SEQ ID NO: 26206 - protein, 9 aa, Homo sapiens
  AACR GENIE Results; PIK3R1_p.D560Y; B1402
EIYKRMNSI

SEQ ID NO: 26207 - protein, 9 aa, Homo sapiens
  AACR GENIE Results; PIK3R1_p.D560Y; C0202
QAAEYREIY

SEQ ID NO: 26208 - protein, 9 aa, Homo sapiens
  AACR GENIE Results; PIK3R1_p.D560Y; A1101
AAEYREIYK

SEQ ID NO: 26209 - protein, 8 aa, Homo sapiens
  AACR GENIE Results; PIK3R1_p.D560Y; C1601
AAEYREIY

SEQ ID NO: 26210 - protein, 10 aa, Homo sapiens
  AACR GENIE Results; PIK3R1_p.D560Y; A1101
QAAEYREIYK

SEQ ID NO: 26211 - protein, 10 aa, Homo sapiens
  AACR GENIE Results; PIK3R1_p.D560Y; A6801
QAAEYREIYK

SEQ ID NO: 26212 - protein, 9 aa, Homo sapiens
  AACR GENIE Results; PIK3R1_p.E666K; A1101
SVVVDGKVK

SEQ ID NO: 26213 - protein, 9 aa, Homo sapiens
  AACR GENIE Results; PIK3R1_p.E666K; A1101
ACSVVVDGK

SEQ ID NO: 26214 - protein, 9 aa, Homo sapiens
  AACR GENIE Results; PIK3R1_p.E666K; A0301
SVVVDGKVK

SEQ ID NO: 26215 - protein, 9 aa, Homo sapiens
  AACR GENIE Results; PIK3R1_p.E666K; A6801
SVVVDGKVK

SEQ ID NO: 26216 - protein, 8 aa, Homo sapiens
  AACR GENIE Results; PIK3R1_p.E666K; A1101
VVVDGKVK

SEQ ID NO: 26217 - protein, 8 aa, Homo sapiens
  AACR GENIE Results; PIK3R1_p.E666K; B1302
SVVVDGKV

SEQ ID NO: 26218 - protein, 9 aa, Homo sapiens
  AACR GENIE Results; PIK3R1_p.E666K; A0301
KVKHCVINK

SEQ ID NO: 26219 - protein, 8 aa, Homo sapiens
  AACR GENIE Results; PIK3R1_p.E666K; B0801
DGKVKHCV

SEQ ID NO: 26220 - protein, 9 aa, Homo sapiens
  AACR GENIE Results; PIK3R1_p.G376R; C0602
GRNNKLIKI

SEQ ID NO: 26221 - protein, 11 aa, Homo sapiens
  AACR GENIE Results; PIK3R1_p.K567E; A6801
NSIEPDLIQLR

SEQ ID NO: 26222 - protein, 11 aa, Homo sapiens
  AACR GENIE Results; PIK3R1_p.K567E; A3303
NSIEPDLIQLR

SEQ ID NO: 26223 - protein, 11 aa, Homo sapiens
  AACR GENIE Results; PIK3R1_p.K567E; A3101
NSIEPDLIQLR

SEQ ID NO: 26224 - protein, 11 aa, Homo sapiens
  AACR GENIE Results; PIK3R1_p.K567E; A6802
NSIEPDLIQLR

SEQ ID NO: 26225 - protein, 10 aa, Homo sapiens
  AACR GENIE Results; PIK3R1_p.K567E; A6802
NSIEPDLIQL

SEQ ID NO: 26226 - protein, 8 aa, Homo sapiens
  AACR GENIE Results; PIK3R1_p.K567E; B4002
IEPDLIQL

SEQ ID NO: 26227 - protein, 10 aa, Homo sapiens
  AACR GENIE Results; PIK3R1_p.K567E; B3503
NSIEPDLIQL

SEQ ID NO: 26228 - protein, 10 aa, Homo sapiens
  AACR GENIE Results; PIK3R1_p.K567E; A6801
SIEPDLIQLR

SEQ ID NO: 26229 - protein, 9 aa, Homo sapiens
  AACR GENIE Results; PIK3R1_p.K567E; B3503
SIEPDLIQL

SEQ ID NO: 26230 - protein, 9 aa, Homo sapiens
  AACR GENIE Results; PIK3R1_p.K567E; A6801
IEPDLIQLR

SEQ ID NO: 26231 - protein, 11 aa, Homo sapiens
  AACR GENIE Results; PIK3R1_p.K567E; B5701
NSIEPDLIQLR

SEQ ID NO: 26232 - protein, 10 aa, Homo sapiens
  AACR GENIE Results; PIK3R1_p.K567E; A3303
SIEPDLIQLR

SEQ ID NO: 26233 - protein, 9 aa, Homo sapiens
  AACR GENIE Results; PIK3R1_p.K567E; A3303
IEPDLIQLR

SEQ ID NO: 26234 - protein, 8 aa, Homo sapiens
  AACR GENIE Results; PIK3R1_p.K567E; B4001
IEPDLIQL

SEQ ID NO: 26235 - protein, 11 aa, Homo sapiens
  AACR GENIE Results; PIK3R1_p.K567E; A1101
NSIEPDLIQLR

SEQ ID NO: 26236 - protein, 9 aa, Homo sapiens
  AACR GENIE Results; PIK3R1_p.K567E; B2702
IEPDLIQLR

SEQ ID NO: 26237 - protein, 8 aa, Homo sapiens
  AACR GENIE Results; PIK3R1_p.S208Y; B5101
MIYLAPEV

SEQ ID NO: 26238 - protein, 9 aa, Homo sapiens
  AACR GENIE Results; PIK3R1_p.S208Y; A0201
EMIYLAPEV

SEQ ID NO: 26239 - protein, 9 aa, Homo sapiens
  AACR GENIE Results; PIK3R1_p.S208Y; A2601
EMIYLAPEV

SEQ ID NO: 26240 - protein, 9 aa, Homo sapiens
  AACR GENIE Results; PLCG2_p.P283H; B1501
TMRETAEHF

SEQ ID NO: 26241 - protein, 9 aa, Homo sapiens
  AACR GENIE Results; PLCG2_p.P283H; A2601
ETAEHFLFV

SEQ ID NO: 26242 - protein, 10 aa, Homo sapiens
  AACR GENIE Results; PLCG2_p.V755I; B2702
DINSLYDISR

SEQ ID NO: 26243 - protein, 10 aa, Homo sapiens
  AACR GENIE Results; PLCG2_p.V755I; A6801
DINSLYDISR

SEQ ID NO: 26244 - protein, 10 aa, Homo sapiens
  AACR GENIE Results; PLCG2_p.V755I; A0201
SLYDISRMYV

SEQ ID NO: 26245 - protein, 9 aa, Homo sapiens
  AACR GENIE Results; PLCG2_p.V755I; A2902
SLYDISRMY

SEQ ID NO: 26246 - protein, 9 aa, Homo sapiens
  AACR GENIE Results; PLCG2_p.V755I; A0301
SLYDISRMY

SEQ ID NO: 26247 - protein, 9 aa, Homo sapiens
  AACR GENIE Results; PLCG2_p.V755I; B1501
SLYDISRMY

SEQ ID NO: 26248 - protein, 8 aa, Homo sapiens
  AACR GENIE Results; PMS1_p.Q698L; B0801
SQNIKMVL

SEQ ID NO: 26249 - protein, 9 aa, Homo sapiens
  AACR GENIE Results; PMS1_p.Q698L; A0301
MVLIPFSMK

SEQ ID NO: 26250 - protein, 8 aa, Homo sapiens
  AACR GENIE Results; PMS1_p.Q698L; B1501
SQNIKMVL

SEQ ID NO: 26251 - protein, 9 aa, Homo sapiens
  AACR GENIE Results; PNRC1_p.S262L; B4001
TENIKNLHL

SEQ ID NO: 26252 - protein, 9 aa, Homo sapiens
  AACR GENIE Results; PNRC1_p.S262L; B4403
TENIKNLHL

SEQ ID NO: 26253 - protein, 9 aa, Homo sapiens
  AACR GENIE Results; PNRC1_p.S262L; B0801
TENIKNLHL

SEQ ID NO: 26254 - protein, 9 aa, Homo sapiens
  AACR GENIE Results; PNRC1_p.S262L; B4402
TENIKNLHL

SEQ ID NO: 26255 - protein, 9 aa, Homo sapiens
  AACR GENIE Results; PNRC1_p.S262L; B0702
TENIKNLHL

SEQ ID NO: 26256 - protein, 9 aa, Homo sapiens
  AACR GENIE Results; PNRC1_p.S262L; B0801
NLHLKKSAF

SEQ ID NO: 26257 - protein, 9 aa, Homo sapiens
  AACR GENIE Results; POLD1_p.G184V; B4001
RELTVPAVL

SEQ ID NO: 26258 - protein, 9 aa, Homo sapiens
  AACR GENIE Results; POLD1_p.G184V; B3501
VPAVLAVEL

SEQ ID NO: 26259 - protein, 9 aa, Homo sapiens
  AACR GENIE Results; POLD1_p.G184V; B0702
VPAVLAVEL

SEQ ID NO: 26260 - protein, 9 aa, Homo sapiens
  AACR GENIE Results; POLD1_p.G184V; A3001
RELTVPAVL

SEQ ID NO: 26261 - protein, 10 aa, Homo sapiens
  AACR GENIE Results; POLD1_p.G184V; A6801
TVPAVLAVEL

SEQ ID NO: 26262 - protein, 9 aa, Homo sapiens
  AACR GENIE Results; POLD1_p.G184V; C1502
LTVPAVLAV

SEQ ID NO: 26263 - protein, 8 aa, Homo sapiens
  AACR GENIE Results; POLD1_p.G184V; B5101
TVPAVLAV

SEQ ID NO: 26264 - protein, 9 aa, Homo sapiens
  AACR GENIE Results; POLD1_p.G184V; A2301
RELTVPAVL

SEQ ID NO: 26265 - protein, 9 aa, Homo sapiens
  AACR GENIE Results; POLD1_p.G184V; B4403
RELTVPAVL

SEQ ID NO: 26266 - protein, 9 aa, Homo sapiens
  AACR GENIE Results; POLD1_p.G184V; B2705
GRELTVPAV

SEQ ID NO: 26267 - protein, 9 aa, Homo sapiens
  AACR GENIE Results; POLE_p.P286R; A3101
TTKLPLKFR

SEQ ID NO: 26268 - protein, 9 aa, Homo sapiens
  AACR GENIE Results; POLE_p.P286R; B3801
FRDAETDQI

SEQ ID NO: 26269 - protein, 9 aa, Homo sapiens
  AACR GENIE Results; PPP2R1A_p.R183W; B5501
TPMVRWAAA

SEQ ID NO: 26270 - protein, 9 aa, Homo sapiens
  AACR GENIE Results; PPP2R1A_p.R183W; B4403
SDDTPMVRW

SEQ ID NO: 26271 - protein, 10 aa, Homo sapiens
  AACR GENIE Results; PPP2R1A_p.R183W; B5701
CSDDTPMVRW

SEQ ID NO: 26272 - protein, 9 aa, Homo sapiens
  AACR GENIE Results; PPP2R1A_p.R183W; B4402
SDDTPMVRW

SEQ ID NO: 26273 - protein, 8 aa, Homo sapiens
  AACR GENIE Results; PPP2R1A_p.R183W; A2301
DDTPMVRW

SEQ ID NO: 26274 - protein, 9 aa, Homo sapiens
  AACR GENIE Results; PPP2R1A_p.R183W; B0702
TPMVRWAAA

SEQ ID NO: 26275 - protein, 8 aa, Homo sapiens
  AACR GENIE Results; PPP2R1A_p.R183W; B5501
TPMVRWAA

SEQ ID NO: 26276 - protein, 9 aa, Homo sapiens
  AACR GENIE Results; PPP2R1A_p.R183W; B0801
TPMVRWAAA

SEQ ID NO: 26277 - protein, 9 aa, Homo sapiens
  AACR GENIE Results; PPP2R1A_p.R183W; A6802
DTPMVRWAA

SEQ ID NO: 26278 - protein, 10 aa, Homo sapiens
  AACR GENIE Results; PPP2R1A_p.R183W; B4403
CSDDTPMVRW

SEQ ID NO: 26279 - protein, 9 aa, Homo sapiens
  AACR GENIE Results; PPP2R1A_p.R183W; B2705
VRWAAASKL

SEQ ID NO: 26280 - protein, 8 aa, Homo sapiens
  AACR GENIE Results; PPP2R1A_p.R183W; B4403
DDTPMVRW

SEQ ID NO: 26281 - protein, 9 aa, Homo sapiens
  AACR GENIE Results; PTCH1_p.R571Q; B3501
IPIPALQAF

SEQ ID NO: 26282 - protein, 9 aa, Homo sapiens
  AACR GENIE Results; PTCH1_p.R571Q; B0702
IPIPALQAF

SEQ ID NO: 26283 - protein, 11 aa, Homo sapiens
  AACR GENIE Results; PTCH1_p.R571Q; B1501
ALIPIPALQAF

SEQ ID NO: 26284 - protein, 9 aa, Homo sapiens
  AACR GENIE Results; PTCH1_p.R571Q; B1501
IPIPALQAF

SEQ ID NO: 26285 - protein, 9 aa, Homo sapiens
  AACR GENIE Results; PTCH1_p.R571Q; B5101
IPIPALQAF

SEQ ID NO: 26286 - protein, 10 aa, Homo sapiens
  AACR GENIE Results; PTCH1_p.R571Q; C0102
LIPIPALQAF

SEQ ID NO: 26287 - protein, 9 aa, Homo sapiens
  AACR GENIE Results; PTEN_p.D92N; B3901
NHNPPQLEL

SEQ ID NO: 26288 - protein, 9 aa, Homo sapiens
  AACR GENIE Results; PTEN_p.D92N; B3801
NHNPPQLEL

SEQ ID NO: 26289 - protein, 9 aa, Homo sapiens
  AACR GENIE Results; PTEN_p.D92N; B4001
FENHNPPQL

SEQ ID NO: 26290 - protein, 9 aa, Homo sapiens
  AACR GENIE Results; PTEN_p.D92N; B4002
FENHNPPQL

SEQ ID NO: 26291 - protein, 11 aa, Homo sapiens
  AACR GENIE Results; PTEN_p.D92N; B3503
YPFENHNPPQL

SEQ ID NO: 26292 - protein, 9 aa, Homo sapiens
  AACR GENIE Results; PTEN_p.D92N; A3001
FENHNPPQL

SEQ ID NO: 26293 - protein, 9 aa, Homo sapiens
  AACR GENIE Results; PTEN_p.D92N; B4901
FENHNPPQL

SEQ ID NO: 26294 - protein, 10 aa, Homo sapiens
  AACR GENIE Results; PTEN_p.D92N; B3801
NHNPPQLELI

SEQ ID NO: 26295 - protein, 11 aa, Homo sapiens
  AACR GENIE Results; PTEN_p.D92N; B3501
YPFENHNPPQL

SEQ ID NO: 26296 - protein, 11 aa, Homo sapiens
  AACR GENIE Results; PTEN_p.D92N; B0702
YPFENHNPPQL

SEQ ID NO: 26297 - protein, 9 aa, Homo sapiens
  AACR GENIE Results; PTEN_p.D92N; B5801
FENHNPPQL

SEQ ID NO: 26298 - protein, 9 aa, Homo sapiens
  AACR GENIE Results; PTEN_p.D92N; B3503
NHNPPQLEL

SEQ ID NO: 26299 - protein, 9 aa, Homo sapiens
  AACR GENIE Results; PTEN_p.D92N; B4403
FENHNPPQL

SEQ ID NO: 26300 - protein, 11 aa, Homo sapiens
  AACR GENIE Results; PTEN_p.D92N; B5101
YPFENHNPPQL

SEQ ID NO: 26301 - protein, 9 aa, Homo sapiens
  AACR GENIE Results; PTEN_p.D92N; B0702
FENHNPPQL

SEQ ID NO: 26302 - protein, 9 aa, Homo sapiens
  AACR GENIE Results; PTEN_p.G165E; A6801
EVTIPSQRR

SEQ ID NO: 26303 - protein, 8 aa, Homo sapiens
  AACR GENIE Results; PTEN_p.G165E; A6801
EVTIPSQR

SEQ ID NO: 26304 - protein, 9 aa, Homo sapiens
  AACR GENIE Results; PTEN_p.G165E; B3801
TRDKKEVTI

SEQ ID NO: 26305 - protein, 9 aa, Homo sapiens
  AACR GENIE Results; PTEN_p.H93R; B4001
FEDRNPPQL

SEQ ID NO: 26306 - protein, 11 aa, Homo sapiens
  AACR GENIE Results; PTEN_p.H93R; B0702
YPFEDRNPPQL

SEQ ID NO: 26307 - protein, 11 aa, Homo sapiens
  AACR GENIE Results; PTEN_p.H93R; B3501
YPFEDRNPPQL

SEQ ID NO: 26308 - protein, 9 aa, Homo sapiens
  AACR GENIE Results; PTEN_p.H93R; B3501
YPFEDRNPP

SEQ ID NO: 26309 - protein, 8 aa, Homo sapiens
  AACR GENIE Results; PTEN_p.M134I; B1801
TGVIICAY

SEQ ID NO: 26310 - protein, 8 aa, Homo sapiens
  AACR GENIE Results; PTEN_p.P246L; B5501
FPQLLPVC

SEQ ID NO: 26311 - protein, 9 aa, Homo sapiens
  AACR GENIE Results; PTEN_p.P246L; C0602
MYFEFPQLL

SEQ ID NO: 26312 - protein, 9 aa, Homo sapiens
  AACR GENIE Results; PTEN_p.P246L; A2402
MYFEFPQLL

SEQ ID NO: 26313 - protein, 9 aa, Homo sapiens
  AACR GENIE Results; PTEN_p.P246L; A2301
MYFEFPQLL

SEQ ID NO: 26314 - protein, 9 aa, Homo sapiens
  AACR GENIE Results; PTEN_p.P246L; B4901
FEFPQLLPV

SEQ ID NO: 26315 - protein, 9 aa, Homo sapiens
  AACR GENIE Results; PTEN_p.P246L; C1402
MYFEFPQLL

SEQ ID NO: 26316 - protein, 9 aa, Homo sapiens
  AACR GENIE Results; PTEN_p.R130Q; B1302
GQTGVMICA

SEQ ID NO: 26317 - protein, 9 aa, Homo sapiens
  AACR GENIE Results; PTEN_p.R130Q; A0205
GQTGVMICA

SEQ ID NO: 26318 - protein, 10 aa, Homo sapiens
  AACR GENIE Results; PTEN_p.R130Q; B1501
GQTGVMICAY

SEQ ID NO: 26319 - protein, 9 aa, Homo sapiens
  AACR GENIE Results; PTEN_p.R130Q; B5001
GQTGVMICA

SEQ ID NO: 26320 - protein, 10 aa, Homo sapiens
  AACR GENIE Results; PTEN_p.R130Q; A3002
GQTGVMICAY

SEQ ID NO: 26321 - protein, 8 aa, Homo sapiens
  AACR GENIE Results; PTEN_p.R130Q; B1302
GQTGVMIC

SEQ ID NO: 26322 - protein, 9 aa, Homo sapiens
  AACR GENIE Results; PTEN_p.R130Q; B1501
AGKGQTGVM

SEQ ID NO: 26323 - protein, 9 aa, Homo sapiens
  AACR GENIE Results; PTEN_p.R173C; B1501
VTIPSQRCY

SEQ ID NO: 26324 - protein, 9 aa, Homo sapiens
  AACR GENIE Results; PTEN_p.R173C; C1601
VTIPSQRCY

SEQ ID NO: 26325 - protein, 9 aa, Homo sapiens
  AACR GENIE Results; PTEN_p.R173C; B5701
VTIPSQRCY

SEQ ID NO: 26326 - protein, 9 aa, Homo sapiens
  AACR GENIE Results; PTEN_p.R173C; C0202
VTIPSQRCY

SEQ ID NO: 26327 - protein, 9 aa, Homo sapiens
  AACR GENIE Results; PTPN11_p.G503V; B1501
VMVQTEAQY

SEQ ID NO: 26328 - protein, 11 aa, Homo sapiens
  AACR GENIE Results; PTPN11_p.G503V; A1101
SVMVQTEAQYR

SEQ ID NO: 26329 - protein, 11 aa, Homo sapiens
  AACR GENIE Results; PTPN11_p.G503V; A3101
SVMVQTEAQYR

SEQ ID NO: 26330 - protein, 11 aa, Homo sapiens
  AACR GENIE Results; PTPN11_p.G503V; A6801
SVMVQTEAQYR

SEQ ID NO: 26331 - protein, 10 aa, Homo sapiens
  AACR GENIE Results; PTPN11_p.G503V; B1501
SVMVQTEAQY

SEQ ID NO: 26332 - protein, 9 aa, Homo sapiens
  AACR GENIE Results; PTPN11_p.G503V; A2902
VMVQTEAQY

SEQ ID NO: 26333 - protein, 9 aa, Homo sapiens
  AACR GENIE Results; PTPN11_p.Q510H; B1501
GMVQTEAHY

SEQ ID NO: 26334 - protein, 9 aa, Homo sapiens
  AACR GENIE Results; PTPN11_p.V505I; B1501
GMIQTEAQY

SEQ ID NO: 26335 - protein, 9 aa, Homo sapiens
  AACR GENIE Results; PTPN11_p.V505I; A2902
GMIQTEAQY

SEQ ID NO: 26336 - protein, 9 aa, Homo sapiens
  AACR GENIE Results; PTPN11_p.V505I; A6801
MIQTEAQYR

SEQ ID NO: 26337 - protein, 9 aa, Homo sapiens
  AACR GENIE Results; PTPRD_p.D1393Y; C0304
IAYYHSRVL

SEQ ID NO: 26338 - protein, 9 aa, Homo sapiens
  AACR GENIE Results; PTPRD_p.D1393Y; C0303
IAYYHSRVL

SEQ ID NO: 26339 - protein, 9 aa, Homo sapiens
  AACR GENIE Results; PTPRD_p.D1393Y; C1203
IAYYHSRVL

SEQ ID NO: 26340 - protein, 9 aa, Homo sapiens
  AACR GENIE Results; PTPRD_p.D1393Y; C1601
IAYYHSRVL

SEQ ID NO: 26341 - protein, 9 aa, Homo sapiens
  AACR GENIE Results; PTPRD_p.D778Y; C0401
FYDTTEHDM

SEQ ID NO: 26342 - protein, 9 aa, Homo sapiens
  AACR GENIE Results; PTPRD_p.G38V; B1501
GVSVGVASF

SEQ ID NO: 26343 - protein, 10 aa, Homo sapiens
  AACR GENIE Results; PTPRD_p.G38V; B0702
TPVDQTGVSV

SEQ ID NO: 26344 - protein, 10 aa, Homo sapiens
  AACR GENIE Results; PTPRD_p.R377L; A0101
EIDGVATTLY

SEQ ID NO: 26345 - protein, 9 aa, Homo sapiens
  AACR GENIE Results; PTPRD_p.R377L; A0201
GVATTLYSV

SEQ ID NO: 26346 - protein, 11 aa, Homo sapiens
  AACR GENIE Results; PTPRD_p.R377L; B4402
KEIDGVATTLY

SEQ ID NO: 26347 - protein, 10 aa, Homo sapiens
  AACR GENIE Results; PTPRD_p.R377L; B4402
KEIDGVATTL

SEQ ID NO: 26348 - protein, 10 aa, Homo sapiens
  AACR GENIE Results; PTPRD_p.R427Q; B0702
APRDVQAQML

SEQ ID NO: 26349 - protein, 9 aa, Homo sapiens
  AACR GENIE Results; PTPRD_p.R427Q; B0702
APRDVQAQM

SEQ ID NO: 26350 - protein, 9 aa, Homo sapiens
  AACR GENIE Results; PTPRD_p.R427Q; B1501
AQMLSSTTI

SEQ ID NO: 26351 - protein, 10 aa, Homo sapiens
  AACR GENIE Results; PTPRD_p.V635L; A1101
VSWQPPPLEK

SEQ ID NO: 26352 - protein, 10 aa, Homo sapiens
  AACR GENIE Results; PTPRD_p.V635L; A0301
VSWQPPPLEK

SEQ ID NO: 26353 - protein, 11 aa, Homo sapiens
  AACR GENIE Results; PTPRS_p.V267M; B3501
MPGGNVNITCM

SEQ ID NO: 26354 - protein, 9 aa, Homo sapiens
  AACR GENIE Results; PTPRS_p.V267M; B3501
MAVGSPMPY

SEQ ID NO: 26355 - protein, 9 aa, Homo sapiens
  AACR GENIE Results; PTPRT_p.S84Y; B1501
MVNSSGRAY

SEQ ID NO: 26356 - protein, 10 aa, Homo sapiens
  AACR GENIE Results; PTPRT_p.S84Y; B1501
MMVNSSGRAY

SEQ ID NO: 26357 - protein, 9 aa, Homo sapiens
  AACR GENIE Results; PTPRT_p.S84Y; B3501
MVNSSGRAY

SEQ ID NO: 26358 - protein, 11 aa, Homo sapiens
  AACR GENIE Results; PTPRT_p.S84Y; B1501
FMMVNSSGRAY

SEQ ID NO: 26359 - protein, 9 aa, Homo sapiens
  AACR GENIE Results; PTPRT_p.S84Y; A2402
AYGQKAHLL

SEQ ID NO: 26360 - protein, 9 aa, Homo sapiens
  AACR GENIE Results; RAF1_p.S257L; B2705
QRLTSTPNV

SEQ ID NO: 26361 - protein, 8 aa, Homo sapiens
  AACR GENIE Results; RAF1_p.S259F; B1501
SQRQRSTF

SEQ ID NO: 26362 - protein, 10 aa, Homo sapiens
  AACR GENIE Results; RASA1_p.R427Q; B1501
YQKEQIVEGY

SEQ ID NO: 26363 - protein, 9 aa, Homo sapiens
  AACR GENIE Results; RB1_p.A18S; A1101
ASEPPAPPP

SEQ ID NO: 26364 - protein, 9 aa, Homo sapiens
  AACR GENIE Results; RB1_p.A18S; A3001
SEPPAPPPP

SEQ ID NO: 26365 - protein, 9 aa, Homo sapiens
  AACR GENIE Results; RB1_p.G310E; B4001
NELPEVENL

SEQ ID NO: 26366 - protein, 11 aa, Homo sapiens
  AACR GENIE Results; RB1_p.G310E; A0201
GLVTSNELPEV

SEQ ID NO: 26367 - protein, 11 aa, Homo sapiens
  AACR GENIE Results; RB1_p.G310E; A6801
ELPEVENLSKR

SEQ ID NO: 26368 - protein, 10 aa, Homo sapiens
  AACR GENIE Results; RB1_p.G310E; A6801
ELPEVENLSK

SEQ ID NO: 26369 - protein, 9 aa, Homo sapiens
  AACR GENIE Results; RB1_p.G310E; A3001
NELPEVENL

SEQ ID NO: 26370 - protein, 9 aa, Homo sapiens
  AACR GENIE Results; RB1_p.G310E; B1801
NELPEVENL

SEQ ID NO: 26371 - protein, 9 aa, Homo sapiens
  AACR GENIE Results; RB1_p.G310E; A2301
NELPEVENL

SEQ ID NO: 26372 - protein, 9 aa, Homo sapiens
  AACR GENIE Results; RB1_p.G310E; B3801
NELPEVENL

SEQ ID NO: 26373 - protein, 9 aa, Homo sapiens
  AACR GENIE Results; RB1_p.G310E; B4403
NELPEVENL

SEQ ID NO: 26374 - protein, 9 aa, Homo sapiens
  AACR GENIE Results; RB1_p.G310E; A0201
VTSNELPEV

SEQ ID NO: 26375 - protein, 9 aa, Homo sapiens
  AACR GENIE Results; RB1_p.G310E; B4901
NELPEVENL

SEQ ID NO: 26376 - protein, 9 aa, Homo sapiens
  AACR GENIE Results; RB1_p.P21Rfs*44; A0301
CLSSGLSLK

SEQ ID NO: 26377 - protein, 9 aa, Homo sapiens
  AACR GENIE Results; RB1_p.P21Rfs*44; A1101
LSSGLSLKK

SEQ ID NO: 26378 - protein, 8 aa, Homo sapiens
  AACR GENIE Results; RB1_p.P21Rfs*44; A1101
SSGLSLKK

SEQ ID NO: 26379 - protein, 10 aa, Homo sapiens
  AACR GENIE Results; RB1_p.P21Rfs*44; A0301
CLSSGLSLKK

SEQ ID NO: 26380 - protein, 9 aa, Homo sapiens
  AACR GENIE Results; RB1_p.P21Rfs*44; A0301
LSSGLSLKK

SEQ ID NO: 26381 - protein, 9 aa, Homo sapiens
  AACR GENIE Results; RB1_p.P21Rfs*44; C0304
TCLSSGLSL

SEQ ID NO: 26382 - protein, 9 aa, Homo sapiens
  AACR GENIE Results; RB1_p.P21Rfs*44; A1101
CLSSGLSLK

SEQ ID NO: 26383 - protein, 8 aa, Homo sapiens
  AACR GENIE Results; RB1_p.P21Rfs*44; B0801
TAARRTCL

SEQ ID NO: 26384 - protein, 9 aa, Homo sapiens
  AACR GENIE Results; RB1_p.P21Rfs*44; C1502
KNLILLHYV

SEQ ID NO: 26385 - protein, 8 aa, Homo sapiens
  AACR GENIE Results; RB1_p.P21Rfs*44; A1101
LSSGLSLK

SEQ ID NO: 26386 - protein, 10 aa, Homo sapiens
  AACR GENIE Results; RB1_p.P21Rfs*44; A0301
TCLSSGLSLK

SEQ ID NO: 26387 - protein, 11 aa, Homo sapiens
  AACR GENIE Results; RB1_p.P21Rfs*44; A0301
RTCLSSGLSLK

SEQ ID NO: 26388 - protein, 9 aa, Homo sapiens
  AACR GENIE Results; RB1_p.P21Rfs*44; C0303
TCLSSGLSL

SEQ ID NO: 26389 - protein, 9 aa, Homo sapiens
  AACR GENIE Results; RB1_p.P21Rfs*44; A3101
RTQSRTAAR

SEQ ID NO: 26390 - protein, 9 aa, Homo sapiens
  AACR GENIE Results; RB1_p.P21Rfs*44; A3101
KQKNLILLH

SEQ ID NO: 26391 - protein, 9 aa, Homo sapiens
  AACR GENIE Results; RB1_p.P21Rfs*44; A6801
LSSGLSLKK

SEQ ID NO: 26392 - protein, 8 aa, Homo sapiens
  AACR GENIE Results; RB1_p.P21Rfs*44; A0301
SSGLSLKK

SEQ ID NO: 26393 - protein, 8 aa, Homo sapiens
  AACR GENIE Results; RB1_p.P21Rfs*44; A0301
LSSGLSLK

SEQ ID NO: 26394 - protein, 8 aa, Homo sapiens
  AACR GENIE Results; RB1_p.R579Q; B4001
QEGPTDHL

SEQ ID NO: 26395 - protein, 9 aa, Homo sapiens
  AACR GENIE Results; RB1_p.R579Q; B3801
DQEGPTDHL

SEQ ID NO: 26396 - protein, 9 aa, Homo sapiens
  AACR GENIE Results; RB1_p.R579Q; C0802
DQEGPTDHL

SEQ ID NO: 26397 - protein, 11 aa, Homo sapiens
  AACR GENIE Results; RB1_p.R798W; B3501
SPLWIPGGNIY

SEQ ID NO: 26398 - protein, 10 aa, Homo sapiens
  AACR GENIE Results; RB1_p.R798W; C0602
YKFPSSPLWI

SEQ ID NO: 26399 - protein, 9 aa, Homo sapiens
  AACR GENIE Results; RB1_p.V654L; A3101
SLFYKKLYR

SEQ ID NO: 26400 - protein, 9 aa, Homo sapiens
  AACR GENIE Results; RB1_p.V654L; B5701
LSLFYKKLY

SEQ ID NO: 26401 - protein, 9 aa, Homo sapiens
  AACR GENIE Results; RBM10_p.G374V; A2601
DVKTINVEF

SEQ ID NO: 26402 - protein, 8 aa, Homo sapiens
  AACR GENIE Results; RBM10_p.G374V; B5101
HPPLTIDV

SEQ ID NO: 26403 - protein, 9 aa, Homo sapiens
  AACR GENIE Results; RBM10_p.G374V; B3501
DVKTINVEF

SEQ ID NO: 26404 - protein, 9 aa, Homo sapiens
  AACR GENIE Results; RBM10_p.G374V; C0501
TIDVKTINV

SEQ ID NO: 26405 - protein, 9 aa, Homo sapiens
  AACR GENIE Results; RBM10_p.G374V; B0801
DVKTINVEF

SEQ ID NO: 26406 - protein, 9 aa, Homo sapiens
  AACR GENIE Results; RBM10_p.G374V; B1501
DVKTINVEF

SEQ ID NO: 26407 - protein, 9 aa, Homo sapiens
  AACR GENIE Results; RBM10_p.G374V; A0201
TIDVKTINV

SEQ ID NO: 26408 - protein, 11 aa, Homo sapiens
  AACR GENIE Results; RBM10_p.G374V; B5101
HPPLTIDVKTI

SEQ ID NO: 26409 - protein, 11 aa, Homo sapiens
  AACR GENIE Results; RBM10_p.R685L; B1501
RLESATADAGY

SEQ ID NO: 26410 - protein, 10 aa, Homo sapiens
  AACR GENIE Results; RBM10_p.R685L; B4403
LESATADAGY

SEQ ID NO: 26411 - protein, 10 aa, Homo sapiens
  AACR GENIE Results; RBM10_p.R766P; B0702
RPQFPSKEAL

SEQ ID NO: 26412 - protein, 9 aa, Homo sapiens
  AACR GENIE Results; RBM10_p.R766P; B0702
RPQFPSKEA

SEQ ID NO: 26413 - protein, 9 aa, Homo sapiens
  AACR GENIE Results; RBM10_p.R766P; B1501
PQFPSKEAL

SEQ ID NO: 26414 - protein, 9 aa, Homo sapiens
  AACR GENIE Results; RBM10_p.T371Nfs*10; A0301
ALHPPLNYR

SEQ ID NO: 26415 - protein, 8 aa, Homo sapiens
  AACR GENIE Results; RBM10_p.T371Nfs*10; A0301
ALHPPLNY

SEQ ID NO: 26416 - protein, 9 aa, Homo sapiens
  AACR GENIE Results; RBM10_p.T371Nfs*10; B3501
QALHPPLNY

SEQ ID NO: 26417 - protein, 8 aa, Homo sapiens
  AACR GENIE Results; RBM10_p.T371Nfs*10; B1501
ALHPPLNY

SEQ ID NO: 26418 - protein, 10 aa, Homo sapiens
  AACR GENIE Results; RBM10_p.T371Nfs*10; B1501
LQALHPPLNY

SEQ ID NO: 26419 - protein, 11 aa, Homo sapiens
  AACR GENIE Results; RECQL4_p.G120R; A1101
GTLQARPALGR

SEQ ID NO: 26420 - protein, 9 aa, Homo sapiens
  AACR GENIE Results; RECQL4_p.G120R; B0702
GTLQARPAL

SEQ ID NO: 26421 - protein, 9 aa, Homo sapiens
  AACR GENIE Results; RECQL4_p.Q595P; B3701
AAPLPPVAF

SEQ ID NO: 26422 - protein, 9 aa, Homo sapiens
  AACR GENIE Results; RECQL4_p.Q595P; B5501
APLPPVAFA

SEQ ID NO: 26423 - protein, 9 aa, Homo sapiens
  AACR GENIE Results; RECQL4_p.Q595P; C0102
AAPLPPVAF

SEQ ID NO: 26424 - protein, 8 aa, Homo sapiens
  AACR GENIE Results; RECQL4_p.Q595P; B3501
APLPPVAF

SEQ ID NO: 26425 - protein, 9 aa, Homo sapiens
  AACR GENIE Results; RECQL4_p.R894K; B0702
APGPKRVCM

SEQ ID NO: 26426 - protein, 9 aa, Homo sapiens
  AACR GENIE Results; RECQL4_p.R894K; C1203
QAAPGPKRV

SEQ ID NO: 26427 - protein, 9 aa, Homo sapiens
  AACR GENIE Results; RECQL4_p.R894K; B5101
QAAPGPKRV

SEQ ID NO: 26428 - protein, 10 aa, Homo sapiens
  AACR GENIE Results; REL_p.S422L; B0702
TPRLGNTNPL

SEQ ID NO: 26429 - protein, 9 aa, Homo sapiens
  AACR GENIE Results; REL_p.S422L; B0702
SVAHPTPRL

SEQ ID NO: 26430 - protein, 8 aa, Homo sapiens
  AACR GENIE Results; REL_p.S422L; C0304
VAHPTPRL

SEQ ID NO: 26431 - protein, 8 aa, Homo sapiens
  AACR GENIE Results; REL_p.S422L; B5101
VAHPTPRL

SEQ ID NO: 26432 - protein, 9 aa, Homo sapiens
  AACR GENIE Results; REL_p.S422L; A1101
SVAHPTPRL

SEQ ID NO: 26433 - protein, 8 aa, Homo sapiens
  AACR GENIE Results; REL_p.S422L; C0303
VAHPTPRL

SEQ ID NO: 26434 - protein, 9 aa, Homo sapiens
  AACR GENIE Results; REL_p.S440L; B0702
STRTLPSNL

SEQ ID NO: 26435 - protein, 8 aa, Homo sapiens
  AACR GENIE Results; RET_p.R348Q; B1501
VQATVHDY

SEQ ID NO: 26436 - protein, 9 aa, Homo sapiens
  AACR GENIE Results; RET_p.R348Q; B1501
FVQATVHDY

SEQ ID NO: 26437 - protein, 9 aa, Homo sapiens
  AACR GENIE Results; RET_p.R348Q; A2902
FVQATVHDY

SEQ ID NO: 26438 - protein, 9 aa, Homo sapiens
  AACR GENIE Results; RET_p.R348Q; B3501
FVQATVHDY

SEQ ID NO: 26439 - protein, 10 aa, Homo sapiens
  AACR GENIE Results; RET_p.R348Q; A2902
SFVQATVHDY

SEQ ID NO: 26440 - protein, 9 aa, Homo sapiens
  AACR GENIE Results; RET_p.R348Q; A2601
FVQATVHDY

SEQ ID NO: 26441 - protein, 9 aa, Homo sapiens
  AACR GENIE Results; RHEB_p.S16F; C0602
YRFVGKSSL

SEQ ID NO: 26442 - protein, 10 aa, Homo sapiens
  AACR GENIE Results; RHEB_p.S16F; A0301
AILGYRFVGK

SEQ ID NO: 26443 - protein, 9 aa, Homo sapiens
  AACR GENIE Results; RHEB_p.S16F; C0702
YRFVGKSSL

SEQ ID NO: 26444 - protein, 9 aa, Homo sapiens
  AACR GENIE Results; RHEB_p.S16F; A0301
ILGYRFVGK

SEQ ID NO: 26445 - protein, 9 aa, Homo sapiens
  AACR GENIE Results; RHEB_p.S16F; B5701
KIAILGYRF

SEQ ID NO: 26446 - protein, 9 aa, Homo sapiens
  AACR GENIE Results; RHEB_p.S16F; C0701
YRFVGKSSL

SEQ ID NO: 26447 - protein, 9 aa, Homo sapiens
  AACR GENIE Results; RHEB_p.S16F; B0801
YRFVGKSSL

SEQ ID NO: 26448 - protein, 10 aa, Homo sapiens
  AACR GENIE Results; RHEB_p.S16F; A1101
AILGYRFVGK

SEQ ID NO: 26449 - protein, 8 aa, Homo sapiens
  AACR GENIE Results; RHEB_p.S16F; B0801
RFVGKSSL

SEQ ID NO: 26450 - protein, 8 aa, Homo sapiens
  AACR GENIE Results; RHEB_p.S16F; B5701
IAILGYRF

SEQ ID NO: 26451 - protein, 9 aa, Homo sapiens
  AACR GENIE Results; RHEB_p.S16F; B0702
YRFVGKSSL

SEQ ID NO: 26452 - protein, 8 aa, Homo sapiens
  AACR GENIE Results; RHEB_p.S16F; A0301
LGYRFVGK

SEQ ID NO: 26453 - protein, 9 aa, Homo sapiens
  AACR GENIE Results; RHEB_p.S16F; B5101
FVGKSSLTI

SEQ ID NO: 26454 - protein, 9 aa, Homo sapiens
  AACR GENIE Results; RICTOR_p.D706E; A6801
TVSSLEYSR

SEQ ID NO: 26455 - protein, 9 aa, Homo sapiens
  AACR GENIE Results; RICTOR_p.D706E; A3303
EYSRDGLAR

SEQ ID NO: 26456 - protein, 9 aa, Homo sapiens
  AACR GENIE Results; RICTOR_p.D706E; B1501
KLTVSSLEY

SEQ ID NO: 26457 - protein, 9 aa, Homo sapiens
  AACR GENIE Results; RICTOR_p.D706E; B2702
TVSSLEYSR

SEQ ID NO: 26458 - protein, 9 aa, Homo sapiens
  AACR GENIE Results; RICTOR_p.D706E; A3303
TVSSLEYSR

SEQ ID NO: 26459 - protein, 9 aa, Homo sapiens
  AACR GENIE Results; RICTOR_p.D706E; A2902
KLTVSSLEY

SEQ ID NO: 26460 - protein, 9 aa, Homo sapiens
  AACR GENIE Results; RICTOR_p.D706E; A3101
TVSSLEYSR

SEQ ID NO: 26461 - protein, 9 aa, Homo sapiens
  AACR GENIE Results; RICTOR_p.D706E; B5001
LEYSRDGLA

SEQ ID NO: 26462 - protein, 9 aa, Homo sapiens
  AACR GENIE Results; RICTOR_p.D706E; A0301
KLTVSSLEY

SEQ ID NO: 26463 - protein, 8 aa, Homo sapiens
  AACR GENIE Results; RICTOR_p.D706E; A0101
LTVSSLEY

SEQ ID NO: 26464 - protein, 9 aa, Homo sapiens
  AACR GENIE Results; RICTOR_p.D706E; A3301
EYSRDGLAR

SEQ ID NO: 26465 - protein, 8 aa, Homo sapiens
  AACR GENIE Results; RICTOR_p.D706E; B5801
LTVSSLEY

SEQ ID NO: 26466 - protein, 9 aa, Homo sapiens
  AACR GENIE Results; RICTOR_p.D706E; A6802
TVSSLEYSR

SEQ ID NO: 26467 - protein, 9 aa, Homo sapiens
  AACR GENIE Results; RICTOR_p.D706E; B5801
KLTVSSLEY

SEQ ID NO: 26468 - protein, 9 aa, Homo sapiens
  AACR GENIE Results; RICTOR_p.D706E; A1101
TVSSLEYSR

SEQ ID NO: 26469 - protein, 8 aa, Homo sapiens
  AACR GENIE Results; RICTOR_p.D706E; B4002
LEYSRDGL

SEQ ID NO: 26470 - protein, 8 aa, Homo sapiens
  AACR GENIE Results; RICTOR_p.D706E; B1501
LTVSSLEY

SEQ ID NO: 26471 - protein, 9 aa, Homo sapiens
  AACR GENIE Results; RICTOR_p.D706E; A3301
TVSSLEYSR

SEQ ID NO: 26472 - protein, 9 aa, Homo sapiens
  AACR GENIE Results; RICTOR_p.D706E; B2702
KLTVSSLEY

SEQ ID NO: 26473 - protein, 8 aa, Homo sapiens
  AACR GENIE Results; RICTOR_p.D706E; B3501
LTVSSLEY

SEQ ID NO: 26474 - protein, 9 aa, Homo sapiens
  AACR GENIE Results; RIT1_p.M90I; A2402
QYIRAGEGF

SEQ ID NO: 26475 - protein, 9 aa, Homo sapiens
  AACR GENIE Results; RIT1_p.M90I; C0602
IRAGEGFII

SEQ ID NO: 26476 - protein, 9 aa, Homo sapiens
  AACR GENIE Results; RNF43_p.P660Sfs*87; C0602
TRNPRPLLL

SEQ ID NO: 26477 - protein, 9 aa, Homo sapiens
  AACR GENIE Results; RNF43_p.P660Sfs*87; B0702
VPRGTPLDL

SEQ ID NO: 26478 - protein, 10 aa, Homo sapiens
  AACR GENIE Results; RNF43_p.P660Sfs*87; B3501
SPAPGTTSTW

SEQ ID NO: 26479 - protein, 10 aa, Homo sapiens
  AACR GENIE Results; RNF43_p.P660Sfs*87; B0702
SPAPGTTSTW

SEQ ID NO: 26480 - protein, 9 aa, Homo sapiens
  AACR GENIE Results; RNF43_p.P660Sfs*87; A3001
ATRNPRPLL

SEQ ID NO: 26481 - protein, 10 aa, Homo sapiens
  AACR GENIE Results; RNF43_p.P660Sfs*87; B3801
SPAPGTTSTW

SEQ ID NO: 26482 - protein, 8 aa, Homo sapiens
  AACR GENIE Results; ROS1_p.E1348D; A0101
NLDKPLIY

SEQ ID NO: 26483 - protein, 9 aa, Homo sapiens
  AACR GENIE Results; ROS1_p.E1348D; C0501
NLDKPLIYF

SEQ ID NO: 26484 - protein, 9 aa, Homo sapiens
  AACR GENIE Results; ROS1_p.E1348D; C0802
NLDKPLIYF

SEQ ID NO: 26485 - protein, 8 aa, Homo sapiens
  AACR GENIE Results; ROS1_p.V1254A; B3502
DADLEHKV

SEQ ID NO: 26486 - protein, 11 aa, Homo sapiens
  AACR GENIE Results; ROS1_p.V1254A; A6802
QVFDADLEHKV

SEQ ID NO: 26487 - protein, 8 aa, Homo sapiens
  AACR GENIE Results; ROS1_p.V1254A; B5101
DADLEHKV

SEQ ID NO: 26488 - protein, 10 aa, Homo sapiens
  AACR GENIE Results; ROS1_p.V1254A; A1101
QVFDADLEHK

SEQ ID NO: 26489 - protein, 11 aa, Homo sapiens
  AACR GENIE Results; ROS1_p.V1254A; A0205
QVFDADLEHKV

SEQ ID NO: 26490 - protein, 9 aa, Homo sapiens
  AACR GENIE Results; RPTOR_p.V1228M; B5101
DGHIMSVSV

SEQ ID NO: 26491 - protein, 9 aa, Homo sapiens
  AACR GENIE Results; RPTOR_p.V1228M; B0702
RPDGHIMSV

SEQ ID NO: 26492 - protein, 9 aa, Homo sapiens
  AACR GENIE Results; RPTOR_p.V1228M; B5501
RPDGHIMSV

SEQ ID NO: 26493 - protein, 8 aa, Homo sapiens
  AACR GENIE Results; RPTOR_p.V1228M; A1101
PDGHIMSV

SEQ ID NO: 26494 - protein, 9 aa, Homo sapiens
  AACR GENIE Results; RPTOR_p.V1228M; B3503
RPDGHIMSV

SEQ ID NO: 26495 - protein, 9 aa, Homo sapiens
  AACR GENIE Results; RPTOR_p.V1228M; B1402
DGHIMSVSV

SEQ ID NO: 26496 - protein, 9 aa, Homo sapiens
  AACR GENIE Results; RPTOR_p.V1228M; C0401
RPDGHIMSV

SEQ ID NO: 26497 - protein, 10 aa, Homo sapiens
  AACR GENIE Results; RPTOR_p.V1228M; C0602
KRPDGHIMSV

SEQ ID NO: 26498 - protein, 9 aa, Homo sapiens
  AACR GENIE Results; RPTOR_p.V1228M; B5101
RPDGHIMSV

SEQ ID NO: 26499 - protein, 8 aa, Homo sapiens
  AACR GENIE Results; RPTOR_p.V1228M; A0201
PDGHIMSV

SEQ ID NO: 26500 - protein, 10 aa, Homo sapiens
  AACR GENIE Results; RPTOR_p.V1228M; A6801
MSVSVNGDVR

SEQ ID NO: 26501 - protein, 9 aa, Homo sapiens
  AACR GENIE Results; RPTOR_p.V1228M; B0801
DGHIMSVSV

SEQ ID NO: 26502 - protein, 8 aa, Homo sapiens
  AACR GENIE Results; RPTOR_p.V1228M; B3901
GHIMSVSV

SEQ ID NO: 26503 - protein, 11 aa, Homo sapiens
  AACR GENIE Results; RUNX1_p.I339_G340dup; B3501
LPSGIISDPRM

SEQ ID NO: 26504 - protein, 9 aa, Homo sapiens
  AACR GENIE Results; RUNX1_p.I339_G340dup; B5101
FPALPSGII

SEQ ID NO: 26505 - protein, 8 aa, Homo sapiens
  AACR GENIE Results; RUNX1_p.I339_G340dup; B5101
FPALPSGI

SEQ ID NO: 26506 - protein, 10 aa, Homo sapiens
  AACR GENIE Results; RUNX1_p.I339_G340dup; B1501
RQFPALPSGI

SEQ ID NO: 26507 - protein, 9 aa, Homo sapiens
  AACR GENIE Results; RUNX1_p.I339_G340dup; B1501
IISDPRMHY

SEQ ID NO: 26508 - protein, 9 aa, Homo sapiens
  AACR GENIE Results; SDHB_p.N106S; C0304
MNISGGNTL

SEQ ID NO: 26509 - protein, 10 aa, Homo sapiens
  AACR GENIE Results; SDHB_p.N106S; B1501
AMNISGGNTL

SEQ ID NO: 26510 - protein, 9 aa, Homo sapiens
  AACR GENIE Results; SDHB_p.N106S; C0303
MNISGGNTL

SEQ ID NO: 26511 - protein, 10 aa, Homo sapiens
  AACR GENIE Results; SDHB_p.N106S; C0102
AMNISGGNTL

SEQ ID NO: 26512 - protein, 9 aa, Homo sapiens
  AACR GENIE Results; SDHB_p.N106S; B0702
MNISGGNTL

SEQ ID NO: 26513 - protein, 9 aa, Homo sapiens
  AACR GENIE Results; SDHC_p.L5F; A3101
ALFLRHVGR

SEQ ID NO: 26514 - protein, 10 aa, Homo sapiens
  AACR GENIE Results; SDHC_p.T33M; B5701
MAKEEMERFW

SEQ ID NO: 26515 - protein, 9 aa, Homo sapiens
  AACR GENIE Results; SDHC_p.T33M; A1101
AVPLGTMAK

SEQ ID NO: 26516 - protein, 10 aa, Homo sapiens
  AACR GENIE Results; SDHC_p.T33M; B2705
IRNAVPLGTM

SEQ ID NO: 26517 - protein, 11 aa, Homo sapiens
  AACR GENIE Results; SDHC_p.T33M; B3501
VPLGTMAKEEM

SEQ ID NO: 26518 - protein, 9 aa, Homo sapiens
  AACR GENIE Results; SDHC_p.T33M; A0301
AVPLGTMAK

SEQ ID NO: 26519 - protein, 10 aa, Homo sapiens
  AACR GENIE Results; SDHC_p.T33M; A6801
NAVPLGTMAK

SEQ ID NO: 26520 - protein, 9 aa, Homo sapiens
  AACR GENIE Results; SDHC_p.T33M; B0702
RNAVPLGTM

SEQ ID NO: 26521 - protein, 9 aa, Homo sapiens
  AACR GENIE Results; SDHC_p.T33M; A0301
RNAVPLGTM

SEQ ID NO: 26522 - protein, 11 aa, Homo sapiens
  AACR GENIE Results; SDHC_p.T33M; B5701
TMAKEEMERFW

SEQ ID NO: 26523 - protein, 8 aa, Homo sapiens
  AACR GENIE Results; SDHC_p.T33M; B5101
NAVPLGTM

SEQ ID NO: 26524 - protein, 8 aa, Homo sapiens
  AACR GENIE Results; SDHC_p.T33M; B3501
NAVPLGTM

SEQ ID NO: 26525 - protein, 8 aa, Homo sapiens
  AACR GENIE Results; SDHC_p.T33M; B0702
NAVPLGTM

SEQ ID NO: 26526 - protein, 9 aa, Homo sapiens
  AACR GENIE Results; SDHD_p.L120S; B1501
SQKAAKAGL

SEQ ID NO: 26527 - protein, 9 aa, Homo sapiens
  AACR GENIE Results; SDHD_p.L120S; A1101
YVHGDASQK

SEQ ID NO: 26528 - protein, 9 aa, Homo sapiens
  AACR GENIE Results; SDHD_p.L120S; A0301
YVHGDASQK

SEQ ID NO: 26529 - protein, 9 aa, Homo sapiens
  AACR GENIE Results; SETBP1_p.E244K; B0702
SPESGRKTA

SEQ ID NO: 26530 - protein, 8 aa, Homo sapiens
  AACR GENIE Results; SETD2_p.S557P; B0702
SPIPRNRL

SEQ ID NO: 26531 - protein, 9 aa, Homo sapiens
  AACR GENIE Results; SF3B1_p.G740E; B4403
REKGLAAFL

SEQ ID NO: 26532 - protein, 9 aa, Homo sapiens
  AACR GENIE Results; SF3B1_p.K666N; C0602
ARHTGINIV

SEQ ID NO: 26533 - protein, 9 aa, Homo sapiens
  AACR GENIE Results; SF3B1_p.K666N; B5101
TGINIVQQI

SEQ ID NO: 26534 - protein, 9 aa, Homo sapiens
  AACR GENIE Results; SF3B1_p.K666N; C0602
TGINIVQQI

SEQ ID NO: 26535 - protein, 9 aa, Homo sapiens
  AACR GENIE Results; SF3B1_p.K666N; C1203
TGINIVQQI

SEQ ID NO: 26536 - protein, 9 aa, Homo sapiens
  AACR GENIE Results; SF3B1_p.K700E; B4001
QEVRTISAL

SEQ ID NO: 26537 - protein, 9 aa, Homo sapiens
  AACR GENIE Results; SF3B1_p.K700E; B4002
QEVRTISAL

SEQ ID NO: 26538 - protein, 9 aa, Homo sapiens
  AACR GENIE Results; SF3B1_p.K700E; A0201
GLVDEQQEV

SEQ ID NO: 26539 - protein, 9 aa, Homo sapiens
  AACR GENIE Results; SF3B1_p.K700E; B4403
QEVRTISAL

SEQ ID NO: 26540 - protein, 9 aa, Homo sapiens
  AACR GENIE Results; SF3B1_p.K700E; B1302
GLVDEQQEV

SEQ ID NO: 26541 - protein, 9 aa, Homo sapiens
  AACR GENIE Results; SF3B1_p.K700E; A3001
QEVRTISAL

SEQ ID NO: 26542 - protein, 9 aa, Homo sapiens
  AACR GENIE Results; SF3B1_p.K700E; B4901
DEQQEVRTI

SEQ ID NO: 26543 - protein, 9 aa, Homo sapiens
  AACR GENIE Results; SF3B1_p.K700E; B1801
DEQQEVRTI

SEQ ID NO: 26544 - protein, 9 aa, Homo sapiens
  AACR GENIE Results; SF3B1_p.K700E; B4403
DEQQEVRTI

SEQ ID NO: 26545 - protein, 9 aa, Homo sapiens
  AACR GENIE Results; SF3B1_p.K700E; B4901
QEVRTISAL

SEQ ID NO: 26546 - protein, 9 aa, Homo sapiens
  AACR GENIE Results; SF3B1_p.K700E; B4402
DEQQEVRTI

SEQ ID NO: 26547 - protein, 8 aa, Homo sapiens
  AACR GENIE Results; SF3B1_p.K700E; C0802
LVDEQQEV

SEQ ID NO: 26548 - protein, 8 aa, Homo sapiens
  AACR GENIE Results; SF3B1_p.K700E; B0801
EVRTISAL

SEQ ID NO: 26549 - protein, 8 aa, Homo sapiens
  AACR GENIE Results; SF3B1_p.K700E; C0501
LVDEQQEV

SEQ ID NO: 26550 - protein, 8 aa, Homo sapiens
  AACR GENIE Results; SF3B1_p.K700E; B4002
QEVRTISA

SEQ ID NO: 26551 - protein, 8 aa, Homo sapiens
  AACR GENIE Results; SF3B1_p.K700E; A2601
EVRTISAL

SEQ ID NO: 26552 - protein, 9 aa, Homo sapiens
  AACR GENIE Results; SF3B1_p.K700E; B4402
QEVRTISAL

SEQ ID NO: 26553 - protein, 9 aa, Homo sapiens
  AACR GENIE Results; SF3B1_p.K700E; B4002
DEQQEVRTI

SEQ ID NO: 26554 - protein, 9 aa, Homo sapiens
  AACR GENIE Results; SF3B1_p.K700E; B0702
QEVRTISAL

SEQ ID NO: 26555 - protein, 10 aa, Homo sapiens
  AACR GENIE Results; SF3B1_p.K700E; B2702
GLVDEQQEVR

SEQ ID NO: 26556 - protein, 9 aa, Homo sapiens
  AACR GENIE Results; SF3B1_p.K700E; A6801
LVDEQQEVR

SEQ ID NO: 26557 - protein, 9 aa, Homo sapiens
  AACR GENIE Results; SF3B1_p.K700E; B1501
QEVRTISAL

SEQ ID NO: 26558 - protein, 9 aa, Homo sapiens
  AACR GENIE Results; SF3B1_p.K700E; B2702
LVDEQQEVR

SEQ ID NO: 26559 - protein, 9 aa, Homo sapiens
  AACR GENIE Results; SF3B1_p.K700E; B1801
QEVRTISAL

SEQ ID NO: 26560 - protein, 9 aa, Homo sapiens
  AACR GENIE Results; SF3B1_p.K700E; A2301
QEVRTISAL

SEQ ID NO: 26561 - protein, 11 aa, Homo sapiens
  AACR GENIE Results; SF3B1_p.K700E; B2702
HGLVDEQQEVR

SEQ ID NO: 26562 - protein, 9 aa, Homo sapiens
  AACR GENIE Results; SF3B1_p.K700E; B1402
QQEVRTISA

SEQ ID NO: 26563 - protein, 9 aa, Homo sapiens
  AACR GENIE Results; SF3B1_p.K700E; B3901
QQEVRTISA

SEQ ID NO: 26564 - protein, 9 aa, Homo sapiens
  AACR GENIE Results; SF3B1_p.K700E; A2301
DEQQEVRTI

SEQ ID NO: 26565 - protein, 8 aa, Homo sapiens
  AACR GENIE Results; SF3B1_p.K700E; A3303
EVRTISAL

SEQ ID NO: 26566 - protein, 8 aa, Homo sapiens
  AACR GENIE Results; SF3B1_p.K700E; B0702
EVRTISAL

SEQ ID NO: 26567 - protein, 9 aa, Homo sapiens
  AACR GENIE Results; SF3B1_p.K700E; B5101
DEQQEVRTI

SEQ ID NO: 26568 - protein, 9 aa, Homo sapiens
  AACR GENIE Results; SF3B1_p.K700E; B1402
QEVRTISAL

SEQ ID NO: 26569 - protein, 9 aa, Homo sapiens
  AACR GENIE Results; SF3B1_p.K700E; B1501
QQEVRTISA

SEQ ID NO: 26570 - protein, 9 aa, Homo sapiens
  AACR GENIE Results; SF3B1_p.K700E; B3501
LVDEQQEVR

SEQ ID NO: 26571 - protein, 9 aa, Homo sapiens
  AACR GENIE Results; SF3B1_p.K700E; B0801
QQEVRTISA

SEQ ID NO: 26572 - protein, 8 aa, Homo sapiens
  AACR GENIE Results; SF3B1_p.K700E; B1501
EVRTISAL

SEQ ID NO: 26573 - protein, 8 aa, Homo sapiens
  AACR GENIE Results; SF3B1_p.K700E; A3001
EVRTISAL

SEQ ID NO: 26574 - protein, 9 aa, Homo sapiens
  AACR GENIE Results; SF3B1_p.K700E; B3901
QEVRTISAL

SEQ ID NO: 26575 - protein, 8 aa, Homo sapiens
  AACR GENIE Results; SF3B1_p.K700E; B1302
EQQEVRTI

SEQ ID NO: 26576 - protein, 11 aa, Homo sapiens
  AACR GENIE Results; SF3B1_p.K700E; B1501
EQQEVRTISAL

SEQ ID NO: 26577 - protein, 11 aa, Homo sapiens
  AACR GENIE Results; SF3B1_p.K700E; B4002
QEVRTISALAI

SEQ ID NO: 26578 - protein, 8 aa, Homo sapiens
  AACR GENIE Results; SF3B1_p.K700E; A0201
LVDEQQEV

SEQ ID NO: 26579 - protein, 8 aa, Homo sapiens
  AACR GENIE Results; SF3B1_p.K700E; B4901
QEVRTISA

SEQ ID NO: 26580 - protein, 9 aa, Homo sapiens
  AACR GENIE Results; SF3B1_p.K700E; B1402
DEQQEVRTI

SEQ ID NO: 26581 - protein, 9 aa, Homo sapiens
  AACR GENIE Results; SF3B1_p.K700E; B1302
QQEVRTISA

SEQ ID NO: 26582 - protein, 10 aa, Homo sapiens
  AACR GENIE Results; SF3B1_p.K700E; B4002
VDEQQEVRTI

SEQ ID NO: 26583 - protein, 9 aa, Homo sapiens
  AACR GENIE Results; SF3B1_p.K700E; B3801
DEQQEVRTI

SEQ ID NO: 26584 - protein, 9 aa, Homo sapiens
  AACR GENIE Results; SF3B1_p.R196Q; A1101
ASQPPSKQK

SEQ ID NO: 26585 - protein, 10 aa, Homo sapiens
  AACR GENIE Results; SF3B1_p.R196Q; A1101
AASQPPSKQK

SEQ ID NO: 26586 - protein, 9 aa, Homo sapiens
  AACR GENIE Results; SF3B1_p.R196Q; A0301
ASQPPSKQK

SEQ ID NO: 26587 - protein, 10 aa, Homo sapiens
  AACR GENIE Results; SF3B1_p.R196Q; A0301
AASQPPSKQK

SEQ ID NO: 26588 - protein, 10 aa, Homo sapiens
  AACR GENIE Results; SF3B1_p.R196Q; A3101
ASQPPSKQKR

SEQ ID NO: 26589 - protein, 9 aa, Homo sapiens
  AACR GENIE Results; SF3B1_p.R196Q; A3001
ASQPPSKQK

SEQ ID NO: 26590 - protein, 11 aa, Homo sapiens
  AACR GENIE Results; SF3B1_p.R196Q; A1101
AAASQPPSKQK

SEQ ID NO: 26591 - protein, 8 aa, Homo sapiens
  AACR GENIE Results; SF3B1_p.R196Q; A1101
SQPPSKQK

SEQ ID NO: 26592 - protein, 9 aa, Homo sapiens
  AACR GENIE Results; SF3B1_p.R196Q; A3101
ASQPPSKQK

SEQ ID NO: 26593 - protein, 11 aa, Homo sapiens
  AACR GENIE Results; SF3B1_p.R196Q; A0301
AAASQPPSKQK

SEQ ID NO: 26594 - protein, 10 aa, Homo sapiens
  AACR GENIE Results; SF3B1_p.R196Q; A3001
AASQPPSKQK

SEQ ID NO: 26595 - protein, 9 aa, Homo sapiens
  AACR GENIE Results; SF3B1_p.R196Q; A3101
SQPPSKQKR

SEQ ID NO: 26596 - protein, 9 aa, Homo sapiens
  AACR GENIE Results; SF3B1_p.R196Q; B5701
ASQPPSKQK

SEQ ID NO: 26597 - protein, 10 aa, Homo sapiens
  AACR GENIE Results; SF3B1_p.R196Q; A6801
AASQPPSKQK

SEQ ID NO: 26598 - protein, 9 aa, Homo sapiens
  AACR GENIE Results; SF3B1_p.R549C; B4001
LEDQECHLL

SEQ ID NO: 26599 - protein, 9 aa, Homo sapiens
  AACR GENIE Results; SF3B1_p.R957Q; B1302
SQTAVVMKT

SEQ ID NO: 26600 - protein, 9 aa, Homo sapiens
  AACR GENIE Results; SF3B1_p.R957Q; A1101
ISQTAVVMK

SEQ ID NO: 26601 - protein, 11 aa, Homo sapiens
  AACR GENIE Results; SF3B1_p.R957Q; A6801
DLISQTAVVMK

SEQ ID NO: 26602 - protein, 9 aa, Homo sapiens
  AACR GENIE Results; SF3B1_p.R957Q; C0802
AADLISQTA

SEQ ID NO: 26603 - protein, 9 aa, Homo sapiens
  AACR GENIE Results; SF3B1_p.R957Q; A0301
ISQTAVVMK

SEQ ID NO: 26604 - protein, 9 aa, Homo sapiens
  AACR GENIE Results; SF3B1_p.R957Q; A0201
SQTAVVMKT

SEQ ID NO: 26605 - protein, 10 aa, Homo sapiens
  AACR GENIE Results; SF3B1_p.R957Q; C0802
AADLISQTAV

SEQ ID NO: 26606 - protein, 8 aa, Homo sapiens
  AACR GENIE Results; SF3B1_p.R957Q; A1101
SQTAVVMK

SEQ ID NO: 26607 - protein, 9 aa, Homo sapiens
  AACR GENIE Results; SF3B1_p.R957Q; A6801
ISQTAVVMK

SEQ ID NO: 26608 - protein, 10 aa, Homo sapiens
  AACR GENIE Results; SF3B1_p.R957Q; A0301
LISQTAVVMK

SEQ ID NO: 26609 - protein, 8 aa, Homo sapiens
  AACR GENIE Results; SF3B1_p.R957Q; B1501
ISQTAVVM

SEQ ID NO: 26610 - protein, 9 aa, Homo sapiens
  AACR GENIE Results; SF3B1_p.R957Q; B0801
DLISQTAVV

SEQ ID NO: 26611 - protein, 8 aa, Homo sapiens
  AACR GENIE Results; SF3B1_p.R957Q; B0801
DLISQTAV

SEQ ID NO: 26612 - protein, 9 aa, Homo sapiens
  AACR GENIE Results; SF3B1_p.R957Q; B5101
DLISQTAVV

SEQ ID NO: 26613 - protein, 10 aa, Homo sapiens
  AACR GENIE Results; SF3B1_p.R957Q; A6801
LISQTAVVMK

SEQ ID NO: 26614 - protein, 10 aa, Homo sapiens
  AACR GENIE Results; SF3B1_p.R957Q; B3501
DLISQTAVVM

SEQ ID NO: 26615 - protein, 10 aa, Homo sapiens
  AACR GENIE Results; SF3B1_p.R957Q; A6801
QAADLISQTA

SEQ ID NO: 26616 - protein, 9 aa, Homo sapiens
  AACR GENIE Results; SF3B1_p.R957Q; B3501
LISQTAVVM

SEQ ID NO: 26617 - protein, 9 aa, Homo sapiens
  AACR GENIE Results; SF3B1_p.R957Q; A2601
DLISQTAVV

SEQ ID NO: 26618 - protein, 10 aa, Homo sapiens
  AACR GENIE Results; SF3B1_p.R957Q; A1101
LISQTAVVMK

SEQ ID NO: 26619 - protein, 11 aa, Homo sapiens
  AACR GENIE Results; SF3B1_p.R957Q; A3101
RQQAADLISQT

SEQ ID NO: 26620 - protein, 10 aa, Homo sapiens
  AACR GENIE Results; SF3B1_p.R957Q; A6801
DLISQTAVVM

SEQ ID NO: 26621 - protein, 9 aa, Homo sapiens
  AACR GENIE Results; SF3B1_p.R957Q; C1203
QAADLISQT

SEQ ID NO: 26622 - protein, 9 aa, Homo sapiens
  AACR GENIE Results; SF3B1_p.R957Q; A3001
ADLISQTAV

SEQ ID NO: 26623 - protein, 8 aa, Homo sapiens
  AACR GENIE Results; SF3B1_p.R957Q; B1302
SQTAVVMK

SEQ ID NO: 26624 - protein, 8 aa, Homo sapiens
  AACR GENIE Results; SF3B1_p.R957Q; C1203
ISQTAVVM

SEQ ID NO: 26625 - protein, 9 aa, Homo sapiens
  AACR GENIE Results; SF3B1_p.R957Q; B1302
DLISQTAVV

SEQ ID NO: 26626 - protein, 9 aa, Homo sapiens
  AACR GENIE Results; SF3B1_p.R957Q; B2705
SQTAVVMKT

SEQ ID NO: 26627 - protein, 9 aa, Homo sapiens
  AACR GENIE Results; SF3B1_p.R957Q; A6801
DLISQTAVV

SEQ ID NO: 26628 - protein, 9 aa, Homo sapiens
  AACR GENIE Results; SF3B1_p.R957Q; B1501
LISQTAVVM

SEQ ID NO: 26629 - protein, 8 aa, Homo sapiens
  AACR GENIE Results; SF3B1_p.R957Q; C1601
ISQTAVVM

SEQ ID NO: 26630 - protein, 9 aa, Homo sapiens
  AACR GENIE Results; SF3B1_p.R957Q; A6801
QAADLISQT

SEQ ID NO: 26631 - protein, 9 aa, Homo sapiens
  AACR GENIE Results; SF3B1_p.R957Q; A3001
SQTAVVMKT

SEQ ID NO: 26632 - protein, 9 aa, Homo sapiens
  AACR GENIE Results; SF3B1_p.R957Q; A3101
SQTAVVMKT

SEQ ID NO: 26633 - protein, 10 aa, Homo sapiens
  AACR GENIE Results; SF3B1_p.R957Q; A2601
DLISQTAVVM

SEQ ID NO: 26634 - protein, 10 aa, Homo sapiens
  AACR GENIE Results; SF3B1_p.R957Q; C0501
AADLISQTAV

SEQ ID NO: 26635 - protein, 10 aa, Homo sapiens
  AACR GENIE Results; SF3B1_p.R957Q; C1203
QAADLISQTA

SEQ ID NO: 26636 - protein, 9 aa, Homo sapiens
  AACR GENIE Results; SF3B1_p.R957Q; A3101
ISQTAVVMK

SEQ ID NO: 26637 - protein, 9 aa, Homo sapiens
  AACR GENIE Results; SF3B1_p.R957Q; B1302
ADLISQTAV

SEQ ID NO: 26638 - protein, 9 aa, Homo sapiens
  AACR GENIE Results; SF3B1_p.R957Q; B3801
SQTAVVMKT

SEQ ID NO: 26639 - protein, 9 aa, Homo sapiens
  AACR GENIE Results; SF3B1_p.R957Q; A3001
QAADLISQT

SEQ ID NO: 26640 - protein, 9 aa, Homo sapiens
  AACR GENIE Results; SF3B1_p.R957Q; A0201
DLISQTAVV

SEQ ID NO: 26641 - protein, 11 aa, Homo sapiens
  AACR GENIE Results; SF3B1_p.R957Q; A0201
QAADLISQTAV

SEQ ID NO: 26642 - protein, 8 aa, Homo sapiens
  AACR GENIE Results; SF3B1_p.R957Q; B1302
DLISQTAV

SEQ ID NO: 26643 - protein, 8 aa, Homo sapiens
  AACR GENIE Results; SF3B1_p.R957Q; B2705
SQTAVVMK

SEQ ID NO: 26644 - protein, 8 aa, Homo sapiens
  AACR GENIE Results; SF3B1_p.R957Q; B5101
DLISQTAV

SEQ ID NO: 26645 - protein, 10 aa, Homo sapiens
  AACR GENIE Results; SF3B1_p.R957Q; A3001
QAADLISQTA

SEQ ID NO: 26646 - protein, 10 aa, Homo sapiens
  AACR GENIE Results; SF3B1_p.R957Q; A0201
AADLISQTAV

SEQ ID NO: 26647 - protein, 9 aa, Homo sapiens
  AACR GENIE Results; SF3B1_p.R957Q; B0702
LISQTAVVM

SEQ ID NO: 26648 - protein, 10 aa, Homo sapiens
  AACR GENIE Results; SMAD2_p.E403K; B1501
SVNQGFKAVY

SEQ ID NO: 26649 - protein, 8 aa, Homo sapiens
  AACR GENIE Results; SMAD2_p.E403K; B1501
NQGFKAVY

SEQ ID NO: 26650 - protein, 10 aa, Homo sapiens
  AACR GENIE Results; SMAD2_p.E403K; A3201
SVNQGFKAVY

SEQ ID NO: 26651 - protein, 10 aa, Homo sapiens
  AACR GENIE Results; SMAD2_p.E403K; A2601
SVNQGFKAVY

SEQ ID NO: 26652 - protein, 9 aa, Homo sapiens
  AACR GENIE Results; SMAD2_p.E403K; B1501
VNQGFKAVY

SEQ ID NO: 26653 - protein, 9 aa, Homo sapiens
  AACR GENIE Results; SMAD2_p.E403K; A1101
AQSVNQGFK

SEQ ID NO: 26654 - protein, 10 aa, Homo sapiens
  AACR GENIE Results; SMAD2_p.E403K; B3501
SVNQGFKAVY

SEQ ID NO: 26655 - protein, 10 aa, Homo sapiens
  AACR GENIE Results; SMAD2_p.E403K; A2902
SVNQGFKAVY

SEQ ID NO: 26656 - protein, 10 aa, Homo sapiens
  AACR GENIE Results; SMAD2_p.E403K; A3101
GFKAVYQLTR

SEQ ID NO: 26657 - protein, 11 aa, Homo sapiens
  AACR GENIE Results; SMAD2_p.E403K; B1501
QSVNQGFKAVY

SEQ ID NO: 26658 - protein, 9 aa, Homo sapiens
  AACR GENIE Results; SMAD2_p.E403K; A2902
VNQGFKAVY

SEQ ID NO: 26659 - protein, 9 aa, Homo sapiens
  AACR GENIE Results; SMAD2_p.E403K; C1502
SVNQGFKAV

SEQ ID NO: 26660 - protein, 10 aa, Homo sapiens
  AACR GENIE Results; SMAD2_p.E403K; A1101
LAQSVNQGFK

SEQ ID NO: 26661 - protein, 8 aa, Homo sapiens
  AACR GENIE Results; SMAD2_p.E403K; B0801
NQGFKAVY

SEQ ID NO: 26662 - protein, 9 aa, Homo sapiens
  AACR GENIE Results; SMAD2_p.E403K; B0702
SVNQGFKAV

SEQ ID NO: 26663 - protein, 9 aa, Homo sapiens
  AACR GENIE Results; SMAD2_p.E403K; A0301
AQSVNQGFK

SEQ ID NO: 26664 - protein, 10 aa, Homo sapiens
  AACR GENIE Results; SMAD2_p.E403K; B4403
SVNQGFKAVY

SEQ ID NO: 26665 - protein, 11 aa, Homo sapiens
  AACR GENIE Results; SMAD2_p.E403K; A0301
LLAQSVNQGFK

SEQ ID NO: 26666 - protein, 9 aa, Homo sapiens
  AACR GENIE Results; SMAD2_p.E403K; A2301
VNQGFKAVY

SEQ ID NO: 26667 - protein, 9 aa, Homo sapiens
  AACR GENIE Results; SMAD2_p.E403K; C1601
SVNQGFKAV

SEQ ID NO: 26668 - protein, 10 aa, Homo sapiens
  AACR GENIE Results; SMAD2_p.E403K; A6801
SVNQGFKAVY

SEQ ID NO: 26669 - protein, 11 aa, Homo sapiens
  AACR GENIE Results; SMAD2_p.E403K; A1101
LLAQSVNQGFK

SEQ ID NO: 26670 - protein, 9 aa, Homo sapiens
  AACR GENIE Results; SMAD2_p.E403K; C0202
KAVYQLTRM

SEQ ID NO: 26671 - protein, 9 aa, Homo sapiens
  AACR GENIE Results; SMAD2_p.E403K; A0201
SVNQGFKAV

SEQ ID NO: 26672 - protein, 11 aa, Homo sapiens
  AACR GENIE Results; SMAD2_p.E403K; B3501
QSVNQGFKAVY

SEQ ID NO: 26673 - protein, 10 aa, Homo sapiens
  AACR GENIE Results; SMAD2_p.E403K; A1101
SVNQGFKAVY

SEQ ID NO: 26674 - protein, 9 aa, Homo sapiens
  AACR GENIE Results; SMAD2_p.R321Q; A6801
QNATVEMTR

SEQ ID NO: 26675 - protein, 10 aa, Homo sapiens
  AACR GENIE Results; SMAD2_p.R321Q; B3501
NVNQNATVEM

SEQ ID NO: 26676 - protein, 9 aa, Homo sapiens
  AACR GENIE Results; SMAD2_p.R321Q; A0201
LLSNVNQNA

SEQ ID NO: 26677 - protein, 8 aa, Homo sapiens
  AACR GENIE Results; SMAD2_p.R321Q; B1501
NQNATVEM

SEQ ID NO: 26678 - protein, 11 aa, Homo sapiens
  AACR GENIE Results; SMAD2_p.R321Q; A0201
LLSNVNQNATV

SEQ ID NO: 26679 - protein, 10 aa, Homo sapiens
  AACR GENIE Results; SMAD2_p.R321Q; A6801
NQNATVEMTR

SEQ ID NO: 26680 - protein, 11 aa, Homo sapiens
  AACR GENIE Results; SMAD2_p.R321Q; A6801
VNQNATVEMTR

SEQ ID NO: 26681 - protein, 10 aa, Homo sapiens
  AACR GENIE Results; SMAD2_p.R321Q; A6801
QNATVEMTRR

SEQ ID NO: 26682 - protein, 10 aa, Homo sapiens
  AACR GENIE Results; SMAD2_p.R321Q; B1501
NVNQNATVEM

SEQ ID NO: 26683 - protein, 9 aa, Homo sapiens
  AACR GENIE Results; SMAD2_p.R321Q; B1501
VNQNATVEM

SEQ ID NO: 26684 - protein, 10 aa, Homo sapiens
  AACR GENIE Results; SMAD2_p.R321Q; B0702
NVNQNATVEM

SEQ ID NO: 26685 - protein, 9 aa, Homo sapiens
  AACR GENIE Results; SMAD2_p.R321Q; B1302
LLSNVNQNA

SEQ ID NO: 26686 - protein, 10 aa, Homo sapiens
  AACR GENIE Results; SMAD2_p.T303R; B3801
FRDPSNSERF

SEQ ID NO: 26687 - protein, 10 aa, Homo sapiens
  AACR GENIE Results; SMAD2_p.T303R; B2702
FRDPSNSERF

SEQ ID NO: 26688 - protein, 9 aa, Homo sapiens
  AACR GENIE Results; SMAD2_p.T303R; B2705
FRDPSNSER

SEQ ID NO: 26689 - protein, 10 aa, Homo sapiens
  AACR GENIE Results; SMAD2_p.T303R; A3101
GFRDPSNSER

SEQ ID NO: 26690 - protein, 10 aa, Homo sapiens
  AACR GENIE Results; SMAD2_p.T303R; C0501
FRDPSNSERF

SEQ ID NO: 26691 - protein, 10 aa, Homo sapiens
  AACR GENIE Results; SMAD2_p.T303R; C0401
FRDPSNSERF

SEQ ID NO: 26692 - protein, 10 aa, Homo sapiens
  AACR GENIE Results; SMAD2_p.T303R; B2705
FRDPSNSERF

SEQ ID NO: 26693 - protein, 9 aa, Homo sapiens
  AACR GENIE Results; SMAD3_p.R287W; B5701
RNAAVELTW

SEQ ID NO: 26694 - protein, 8 aa, Homo sapiens
  AACR GENIE Results; SMAD3_p.R287W; B5701
NAAVELTW

SEQ ID NO: 26695 - protein, 9 aa, Homo sapiens
  AACR GENIE Results; SMAD3_p.R373H; A1101
CTIHMSFVK

SEQ ID NO: 26696 - protein, 8 aa, Homo sapiens
  AACR GENIE Results; SMAD3_p.R373H; C1601
MCTIHMSF

SEQ ID NO: 26697 - protein, 9 aa, Homo sapiens
  AACR GENIE Results; SMAD4_p.A118V; C0401
VFDLKCDSV

SEQ ID NO: 26698 - protein, 10 aa, Homo sapiens
  AACR GENIE Results; SMAD4_p.A118V; A6802
YVFDLKCDSV

SEQ ID NO: 26699 - protein, 10 aa, Homo sapiens
  AACR GENIE Results; SMAD4_p.A118V; A0205
YVFDLKCDSV

SEQ ID NO: 26700 - protein, 9 aa, Homo sapiens
  AACR GENIE Results; SMAD4_p.A118V; C0802
VFDLKCDSV

SEQ ID NO: 26701 - protein, 9 aa, Homo sapiens
  AACR GENIE Results; SMAD4_p.A406V; A0201
CLSDHVVFV

SEQ ID NO: 26702 - protein, 9 aa, Homo sapiens
  AACR GENIE Results; SMAD4_p.A406V; B1801
DHVVFVQSY

SEQ ID NO: 26703 - protein, 8 aa, Homo sapiens
  AACR GENIE Results; SMAD4_p.A406V; B1501
HVVFVQSY

SEQ ID NO: 26704 - protein, 9 aa, Homo sapiens
  AACR GENIE Results; SMAD4_p.A406V; B1402
DHVVFVQSY

SEQ ID NO: 26705 - protein, 9 aa, Homo sapiens
  AACR GENIE Results; SMAD4_p.A406V; B3501
DHVVFVQSY

SEQ ID NO: 26706 - protein, 8 aa, Homo sapiens
  AACR GENIE Results; SMAD4_p.A406V; C0501
LSDHVVFV

SEQ ID NO: 26707 - protein, 10 aa, Homo sapiens
  AACR GENIE Results; SMAD4_p.A406V; A6802
HVVFVQSYYL

SEQ ID NO: 26708 - protein, 9 aa, Homo sapiens
  AACR GENIE Results; SMAD4_p.A406V; A6802
CLSDHVVFV

SEQ ID NO: 26709 - protein, 9 aa, Homo sapiens
  AACR GENIE Results; SMAD4_p.A406V; B3901
DHVVFVQSY

SEQ ID NO: 26710 - protein, 9 aa, Homo sapiens
  AACR GENIE Results; SMAD4_p.A406V; B1302
CLSDHVVFV

SEQ ID NO: 26711 - protein, 9 aa, Homo sapiens
  AACR GENIE Results; SMAD4_p.A406V; A2902
HVVFVQSYY

SEQ ID NO: 26712 - protein, 8 aa, Homo sapiens
  AACR GENIE Results; SMAD4_p.A406V; B3501
HVVFVQSY

SEQ ID NO: 26713 - protein, 8 aa, Homo sapiens
  AACR GENIE Results; SMAD4_p.A406V; B1801
HVVFVQSY

SEQ ID NO: 26714 - protein, 9 aa, Homo sapiens
  AACR GENIE Results; SMAD4_p.A406V; B3801
DHVVFVQSY

SEQ ID NO: 26715 - protein, 9 aa, Homo sapiens
  AACR GENIE Results; SMAD4_p.A406V; A2301
DHVVFVQSY

SEQ ID NO: 26716 - protein, 11 aa, Homo sapiens
  AACR GENIE Results; SMAD4_p.A406V; A0101
LSDHVVFVQSY

SEQ ID NO: 26717 - protein, 9 aa, Homo sapiens
  AACR GENIE Results; SMAD4_p.D351H; B3501
CPIVTVHGY

SEQ ID NO: 26718 - protein, 8 aa, Homo sapiens
  AACR GENIE Results; SMAD4_p.D351H; B1501
PIVTVHGY

SEQ ID NO: 26719 - protein, 9 aa, Homo sapiens
  AACR GENIE Results; SMAD4_p.D351N; B3501
CPIVTVNGY

SEQ ID NO: 26720 - protein, 9 aa, Homo sapiens
  AACR GENIE Results; SMAD4_p.D351V; B3501
CPIVTVVGY

SEQ ID NO: 26721 - protein, 9 aa, Homo sapiens
  AACR GENIE Results; SMAD4_p.D351V; C1203
SSCPIVTVV

SEQ ID NO: 26722 - protein, 9 aa, Homo sapiens
  AACR GENIE Results; SMAD4_p.D351Y; C1203
SSCPIVTVY

SEQ ID NO: 26723 - protein, 9 aa, Homo sapiens
  AACR GENIE Results; SMAD4_p.D351Y; B3501
SSCPIVTVY

SEQ ID NO: 26724 - protein, 9 aa, Homo sapiens
  AACR GENIE Results; SMAD4_p.D351Y; B1501
SSCPIVTVY

SEQ ID NO: 26725 - protein, 11 aa, Homo sapiens
  AACR GENIE Results; SMAD4_p.D351Y; B3501
VPSSCPIVTVY

SEQ ID NO: 26726 - protein, 9 aa, Homo sapiens
  AACR GENIE Results; SMAD4_p.D351Y; B3501
CPIVTVYGY

SEQ ID NO: 26727 - protein, 9 aa, Homo sapiens
  AACR GENIE Results; SMAD4_p.D351Y; A2902
SSCPIVTVY

SEQ ID NO: 26728 - protein, 9 aa, Homo sapiens
  AACR GENIE Results; SMAD4_p.D351Y; C1601
SSCPIVTVY

SEQ ID NO: 26729 - protein, 9 aa, Homo sapiens
  AACR GENIE Results; SMAD4_p.D351Y; C0202
SSCPIVTVY

SEQ ID NO: 26730 - protein, 9 aa, Homo sapiens
  AACR GENIE Results; SMAD4_p.D351Y; A2601
SSCPIVTVY

SEQ ID NO: 26731 - protein, 9 aa, Homo sapiens
  AACR GENIE Results; SMAD4_p.D351Y; A1101
SSCPIVTVY

SEQ ID NO: 26732 - protein, 9 aa, Homo sapiens
  AACR GENIE Results; SMAD4_p.D351Y; B5701
SSCPIVTVY

SEQ ID NO: 26733 - protein, 9 aa, Homo sapiens
  AACR GENIE Results; SMAD4_p.D351Y; A6801
SSCPIVTVY

SEQ ID NO: 26734 - protein, 10 aa, Homo sapiens
  AACR GENIE Results; SMAD4_p.D355G; B3801
YVGPSGGDRF

SEQ ID NO: 26735 - protein, 11 aa, Homo sapiens
  AACR GENIE Results; SMAD4_p.D355G; B3801
GYVGPSGGDRF

SEQ ID NO: 26736 - protein, 8 aa, Homo sapiens
  AACR GENIE Results; SMAD4_p.D355G; B5101
DGYVGPSG

SEQ ID NO: 26737 - protein, 11 aa, Homo sapiens
  AACR GENIE Results; SMAD4_p.D355G; A2301
GYVGPSGGDRF

SEQ ID NO: 26738 - protein, 10 aa, Homo sapiens
  AACR GENIE Results; SMAD4_p.D355G; B1501
YVGPSGGDRF

SEQ ID NO: 26739 - protein, 10 aa, Homo sapiens
  AACR GENIE Results; SMAD4_p.D355G; B3501
YVGPSGGDRF

SEQ ID NO: 26740 - protein, 10 aa, Homo sapiens
  AACR GENIE Results; SMAD4_p.D355G; A2601
YVGPSGGDRF

SEQ ID NO: 26741 - protein, 8 aa, Homo sapiens
  AACR GENIE Results; SMAD4_p.D355V; B5101
DGYVVPSG

SEQ ID NO: 26742 - protein, 10 aa, Homo sapiens
  AACR GENIE Results; SMAD4_p.D355V; B3801
YVVPSGGDRF

SEQ ID NO: 26743 - protein, 11 aa, Homo sapiens
  AACR GENIE Results; SMAD4_p.D355V; A2301
GYVVPSGGDRF

SEQ ID NO: 26744 - protein, 10 aa, Homo sapiens
  AACR GENIE Results; SMAD4_p.D355V; A2601
YVVPSGGDRF

SEQ ID NO: 26745 - protein, 11 aa, Homo sapiens
  AACR GENIE Results; SMAD4_p.D355V; B3801
GYVVPSGGDRF

SEQ ID NO: 26746 - protein, 10 aa, Homo sapiens
  AACR GENIE Results; SMAD4_p.D355V; B1501
YVVPSGGDRF

SEQ ID NO: 26747 - protein, 10 aa, Homo sapiens
  AACR GENIE Results; SMAD4_p.D355V; B3501
YVVPSGGDRF

SEQ ID NO: 26748 - protein, 11 aa, Homo sapiens
  AACR GENIE Results; SMAD4_p.D355V; B3901
GYVVPSGGDRF

SEQ ID NO: 26749 - protein, 9 aa, Homo sapiens
  AACR GENIE Results; SMAD4_p.D355V; B1501
VVPSGGDRF

SEQ ID NO: 26750 - protein, 10 aa, Homo sapiens
  AACR GENIE Results; SMAD4_p.D355V; B3901
YVVPSGGDRF

SEQ ID NO: 26751 - protein, 11 aa, Homo sapiens
  AACR GENIE Results; SMAD4_p.D355V; A2402
GYVVPSGGDRF

SEQ ID NO: 26752 - protein, 10 aa, Homo sapiens
  AACR GENIE Results; SMAD4_p.D360V; C0501
YVDPSGGVRF

SEQ ID NO: 26753 - protein, 10 aa, Homo sapiens
  AACR GENIE Results; SMAD4_p.D360V; A0101
YVDPSGGVRF

SEQ ID NO: 26754 - protein, 10 aa, Homo sapiens
  AACR GENIE Results; SMAD4_p.D360V; B3501
YVDPSGGVRF

SEQ ID NO: 26755 - protein, 10 aa, Homo sapiens
  AACR GENIE Results; SMAD4_p.D360V; B1501
YVDPSGGVRF

SEQ ID NO: 26756 - protein, 11 aa, Homo sapiens
  AACR GENIE Results; SMAD4_p.D360V; A2402
GYVDPSGGVRF

SEQ ID NO: 26757 - protein, 10 aa, Homo sapiens
  AACR GENIE Results; SMAD4_p.D360V; C0401
YVDPSGGVRF

SEQ ID NO: 26758 - protein, 11 aa, Homo sapiens
  AACR GENIE Results; SMAD4_p.D360V; A0201
YVDPSGGVRFC

SEQ ID NO: 26759 - protein, 10 aa, Homo sapiens
  AACR GENIE Results; SMAD4_p.D360V; C0304
YVDPSGGVRF

SEQ ID NO: 26760 - protein, 8 aa, Homo sapiens
  AACR GENIE Results; SMAD4_p.D360V; B3501
DPSGGVRF

SEQ ID NO: 26761 - protein, 10 aa, Homo sapiens
  AACR GENIE Results; SMAD4_p.D360V; A2601
YVDPSGGVRF

SEQ ID NO: 26762 - protein, 11 aa, Homo sapiens
  AACR GENIE Results; SMAD4_p.D360V; B1501
GYVDPSGGVRF

SEQ ID NO: 26763 - protein, 8 aa, Homo sapiens
  AACR GENIE Results; SMAD4_p.D360V; C0501
YVDPSGGV

SEQ ID NO: 26764 - protein, 10 aa, Homo sapiens
  AACR GENIE Results; SMAD4_p.D415Efs*20; A2301
YYLEKLGVHL

SEQ ID NO: 26765 - protein, 10 aa, Homo sapiens
  AACR GENIE Results; SMAD4_p.D415Efs*20; A2402
YYLEKLGVHL

SEQ ID NO: 26766 - protein, 9 aa, Homo sapiens
  AACR GENIE Results; SMAD4_p.D415Efs*20; A6802
FIRSTQVHI

SEQ ID NO: 26767 - protein, 9 aa, Homo sapiens
  AACR GENIE Results; SMAD4_p.D415Efs*20; B1302
FIRSTQVHI

SEQ ID NO: 26768 - protein, 10 aa, Homo sapiens
  AACR GENIE Results; SMAD4_p.D415Efs*20; C1402
YYLEKLGVHL

SEQ ID NO: 26769 - protein, 8 aa, Homo sapiens
  AACR GENIE Results; SMAD4_p.D415Efs*20; C0602
IRSTQVHI

SEQ ID NO: 26770 - protein, 8 aa, Homo sapiens
  AACR GENIE Results; SMAD4_p.D415Efs*20; B4002
LEKLGVHL

SEQ ID NO: 26771 - protein, 9 aa, Homo sapiens
  AACR GENIE Results; SMAD4_p.D415Efs*20; B0801
MLFIRSTQV

SEQ ID NO: 26772 - protein, 8 aa, Homo sapiens
  AACR GENIE Results; SMAD4_p.D415Efs*20; B3801
IRSTQVHI

SEQ ID NO: 26773 - protein, 9 aa, Homo sapiens
  AACR GENIE Results; SMAD4_p.D415Efs*20; A0201
MLFIRSTQV

SEQ ID NO: 26774 - protein, 9 aa, Homo sapiens
  AACR GENIE Results; SMAD4_p.D415Efs*20; B1302
MLFIRSTQV

SEQ ID NO: 26775 - protein, 9 aa, Homo sapiens
  AACR GENIE Results; SMAD4_p.D415Efs*20; C1502
FIRSTQVHI

SEQ ID NO: 26776 - protein, 9 aa, Homo sapiens
  AACR GENIE Results; SMAD4_p.D415Efs*20; A3001
FIRSTQVHI

SEQ ID NO: 26777 - protein, 9 aa, Homo sapiens
  AACR GENIE Results; SMAD4_p.D415Efs*20; B5701
FIRSTQVHI

SEQ ID NO: 26778 - protein, 9 aa, Homo sapiens
  AACR GENIE Results; SMAD4_p.D415Efs*20; C0202
FIRSTQVHI

SEQ ID NO: 26779 - protein, 11 aa, Homo sapiens
  AACR GENIE Results; SMAD4_p.D493H; A6801
AAAGIGVHDLR

SEQ ID NO: 26780 - protein, 9 aa, Homo sapiens
  AACR GENIE Results; SMAD4_p.D493H; B5701
AGIGVHDLR

SEQ ID NO: 26781 - protein, 9 aa, Homo sapiens
  AACR GENIE Results; SMAD4_p.D493H; A6801
AGIGVHDLR

SEQ ID NO: 26782 - protein, 8 aa, Homo sapiens
  AACR GENIE Results; SMAD4_p.D493H; B1501
AGIGVHDL

SEQ ID NO: 26783 - protein, 9 aa, Homo sapiens
  AACR GENIE Results; SMAD4_p.D493H; B3501
SAAAGIGVH

SEQ ID NO: 26784 - protein, 10 aa, Homo sapiens
  AACR GENIE Results; SMAD4_p.D493H; A6801
AAAGIGVHDL

SEQ ID NO: 26785 - protein, 11 aa, Homo sapiens
  AACR GENIE Results; SMAD4_p.D493N; A6801
AAAGIGVNDLR

SEQ ID NO: 26786 - protein, 11 aa, Homo sapiens
  AACR GENIE Results; SMAD4_p.D493N; B2702
AAAGIGVNDLR

SEQ ID NO: 26787 - protein, 10 aa, Homo sapiens
  AACR GENIE Results; SMAD4_p.D493N; B2702
AAGIGVNDLR

SEQ ID NO: 26788 - protein, 9 aa, Homo sapiens
  AACR GENIE Results; SMAD4_p.D493N; A6801
AGIGVNDLR

SEQ ID NO: 26789 - protein, 10 aa, Homo sapiens
  AACR GENIE Results; SMAD4_p.D493N; A1101
AAGIGVNDLR

SEQ ID NO: 26790 - protein, 10 aa, Homo sapiens
  AACR GENIE Results; SMAD4_p.D493N; A6801
AAGIGVNDLR

SEQ ID NO: 26791 - protein, 9 aa, Homo sapiens
  AACR GENIE Results; SMAD4_p.D493N; A3101
AGIGVNDLR

SEQ ID NO: 26792 - protein, 11 aa, Homo sapiens
  AACR GENIE Results; SMAD4_p.D493N; A3101
AAAGIGVNDLR

SEQ ID NO: 26793 - protein, 9 aa, Homo sapiens
  AACR GENIE Results; SMAD4_p.D493N; B5701
AGIGVNDLR

SEQ ID NO: 26794 - protein, 9 aa, Homo sapiens
  AACR GENIE Results; SMAD4_p.D537G; B4901
GEVLHTMPI

SEQ ID NO: 26795 - protein, 9 aa, Homo sapiens
  AACR GENIE Results; SMAD4_p.D537G; B4002
GEVLHTMPI

SEQ ID NO: 26796 - protein, 10 aa, Homo sapiens
  AACR GENIE Results; SMAD4_p.D537G; B5001
GEVLHTMPIA

SEQ ID NO: 26797 - protein, 10 aa, Homo sapiens
  AACR GENIE Results; SMAD4_p.D537G; A0205
GEVLHTMPIA

SEQ ID NO: 26798 - protein, 9 aa, Homo sapiens
  AACR GENIE Results; SMAD4_p.D537G; A0201
LLGEVLHTM

SEQ ID NO: 26799 - protein, 10 aa, Homo sapiens
  AACR GENIE Results; SMAD4_p.D537G; B4002
GEVLHTMPIA

SEQ ID NO: 26800 - protein, 9 aa, Homo sapiens
  AACR GENIE Results; SMAD4_p.D537G; B4001
GEVLHTMPI

SEQ ID NO: 26801 - protein, 9 aa, Homo sapiens
  AACR GENIE Results; SMAD4_p.D537G; B1501
ALQLLGEVL

SEQ ID NO: 26802 - protein, 9 aa, Homo sapiens
  AACR GENIE Results; SMAD4_p.D537G; A3001
GEVLHTMPI

SEQ ID NO: 26803 - protein, 10 aa, Homo sapiens
  AACR GENIE Results; SMAD4_p.D537G; A0201
QLLGEVLHTM

SEQ ID NO: 26804 - protein, 9 aa, Homo sapiens
  AACR GENIE Results; SMAD4_p.D537G; B3701
GEVLHTMPI

SEQ ID NO: 26805 - protein, 9 aa, Homo sapiens
  AACR GENIE Results; SMAD4_p.D537G; B1302
GEVLHTMPI

SEQ ID NO: 26806 - protein, 9 aa, Homo sapiens
  AACR GENIE Results; SMAD4_p.D537V; A0201
LLVEVLHTM

SEQ ID NO: 26807 - protein, 8 aa, Homo sapiens
  AACR GENIE Results; SMAD4_p.D537V; B1501
LQLLVEVL

SEQ ID NO: 26808 - protein, 9 aa, Homo sapiens
  AACR GENIE Results; SMAD4_p.D537V; B1501
ALQLLVEVL

SEQ ID NO: 26809 - protein, 9 aa, Homo sapiens
  AACR GENIE Results; SMAD4_p.D537V; A0201
ALQLLVEVL

SEQ ID NO: 26810 - protein, 11 aa, Homo sapiens
  AACR GENIE Results; SMAD4_p.E330K; B3801
FKMDVQVGETF

SEQ ID NO: 26811 - protein, 10 aa, Homo sapiens
  AACR GENIE Results; SMAD4_p.E330K; B1501
KMDVQVGETF

SEQ ID NO: 26812 - protein, 10 aa, Homo sapiens
  AACR GENIE Results; SMAD4_p.E330K; B3801
KMDVQVGETF

SEQ ID NO: 26813 - protein, 9 aa, Homo sapiens
  AACR GENIE Results; SMAD4_p.E330K; A2301
AYFKMDVQV

SEQ ID NO: 26814 - protein, 8 aa, Homo sapiens
  AACR GENIE Results; SMAD4_p.E330K; B5101
IAYFKMDV

SEQ ID NO: 26815 - protein, 9 aa, Homo sapiens
  AACR GENIE Results; SMAD4_p.G231Afs*10; A1101
SILGAAIVK

SEQ ID NO: 26816 - protein, 10 aa, Homo sapiens
  AACR GENIE Results; SMAD4_p.G231Afs*10; A1101
ASILGAAIVK

SEQ ID NO: 26817 - protein, 9 aa, Homo sapiens
  AACR GENIE Results; SMAD4_p.G231Afs*10; A0301
SILGAAIVK

SEQ ID NO: 26818 - protein, 9 aa, Homo sapiens
  AACR GENIE Results; SMAD4_p.G231Afs*10; B1302
SQPASILGA

SEQ ID NO: 26819 - protein, 10 aa, Homo sapiens
  AACR GENIE Results; SMAD4_p.G231Afs*10; B0702
QPASILGAAI

SEQ ID NO: 26820 - protein, 11 aa, Homo sapiens
  AACR GENIE Results; SMAD4_p.G231Afs*10; B1302
SQPASILGAAI

SEQ ID NO: 26821 - protein, 11 aa, Homo sapiens
  AACR GENIE Results; SMAD4_p.G231Afs*10; A1101
STSQPASILGA

SEQ ID NO: 26822 - protein, 9 aa, Homo sapiens
  AACR GENIE Results; SMAD4_p.G352E; B3501
CPIVTVDEY

SEQ ID NO: 26823 - protein, 11 aa, Homo sapiens
  AACR GENIE Results; SMAD4_p.G352E; B3901
EYVDPSGGDRF

SEQ ID NO: 26824 - protein, 11 aa, Homo sapiens
  AACR GENIE Results; SMAD4_p.G352E; B3801
EYVDPSGGDRF

SEQ ID NO: 26825 - protein, 10 aa, Homo sapiens
  AACR GENIE Results; SMAD4_p.G352E; A3303
EYVDPSGGDR

SEQ ID NO: 26826 - protein, 11 aa, Homo sapiens
  AACR GENIE Results; SMAD4_p.G352E; A3303
EYVDPSGGDRF

SEQ ID NO: 26827 - protein, 11 aa, Homo sapiens
  AACR GENIE Results; SMAD4_p.G352E; A2301
EYVDPSGGDRF

SEQ ID NO: 26828 - protein, 11 aa, Homo sapiens
  AACR GENIE Results; SMAD4_p.G352E; A2601
EYVDPSGGDRF

SEQ ID NO: 26829 - protein, 11 aa, Homo sapiens
  AACR GENIE Results; SMAD4_p.G352E; A2402
EYVDPSGGDRF

SEQ ID NO: 26830 - protein, 11 aa, Homo sapiens
  AACR GENIE Results; SMAD4_p.G352E; B3501
EYVDPSGGDRF

SEQ ID NO: 26831 - protein, 8 aa, Homo sapiens
  AACR GENIE Results; SMAD4_p.G352E; B3501
PIVTVDEY

SEQ ID NO: 26832 - protein, 8 aa, Homo sapiens
  AACR GENIE Results; SMAD4_p.G365D; A3303
DQLSNVHR

SEQ ID NO: 26833 - protein, 9 aa, Homo sapiens
  AACR GENIE Results; SMAD4_p.G386D; B3801
LHIGKDVQL

SEQ ID NO: 26834 - protein, 9 aa, Homo sapiens
  AACR GENIE Results; SMAD4_p.G386D; B3901
LHIGKDVQL

SEQ ID NO: 26835 - protein, 8 aa, Homo sapiens
  AACR GENIE Results; SMAD4_p.G386D; B3901
HIGKDVQL

SEQ ID NO: 26836 - protein, 8 aa, Homo sapiens
  AACR GENIE Results; SMAD4_p.G386D; B3502
HIGKDVQL

SEQ ID NO: 26837 - protein, 8 aa, Homo sapiens
  AACR GENIE Results; SMAD4_p.G386D; B3801
HIGKDVQL

SEQ ID NO: 26838 - protein, 8 aa, Homo sapiens
  AACR GENIE Results; SMAD4_p.G386D; B3503
HIGKDVQL

SEQ ID NO: 26839 - protein, 9 aa, Homo sapiens
  AACR GENIE Results; SMAD4_p.G386V; B3801
LHIGKVVQL

SEQ ID NO: 26840 - protein, 9 aa, Homo sapiens
  AACR GENIE Results; SMAD4_p.G386V; B2705
ARLHIGKVV

SEQ ID NO: 26841 - protein, 8 aa, Homo sapiens
  AACR GENIE Results; SMAD4_p.G386V; B0801
HIGKVVQL

SEQ ID NO: 26842 - protein, 9 aa, Homo sapiens
  AACR GENIE Results; SMAD4_p.G419R; A3303
YYLDREARR

SEQ ID NO: 26843 - protein, 9 aa, Homo sapiens
  AACR GENIE Results; SMAD4_p.G419R; A3303
SYYLDREAR

SEQ ID NO: 26844 - protein, 9 aa, Homo sapiens
  AACR GENIE Results; SMAD4_p.G419R; A3101
SYYLDREAR

SEQ ID NO: 26845 - protein, 10 aa, Homo sapiens
  AACR GENIE Results; SMAD4_p.G419R; B2705
RRAPGDAVHK

SEQ ID NO: 26846 - protein, 9 aa, Homo sapiens
  AACR GENIE Results; SMAD4_p.G419R; A3001
ARRAPGDAV

SEQ ID NO: 26847 - protein, 10 aa, Homo sapiens
  AACR GENIE Results; SMAD4_p.G419W; B5701
QSYYLDREAW

SEQ ID NO: 26848 - protein, 9 aa, Homo sapiens
  AACR GENIE Results; SMAD4_p.G419W; C1402
SYYLDREAW

SEQ ID NO: 26849 - protein, 8 aa, Homo sapiens
  AACR GENIE Results; SMAD4_p.G419W; C1402
YYLDREAW

SEQ ID NO: 26850 - protein, 10 aa, Homo sapiens
  AACR GENIE Results; SMAD4_p.G419W; A6802
EAWRAPGDAV

SEQ ID NO: 26851 - protein, 9 aa, Homo sapiens
  AACR GENIE Results; SMAD4_p.G419W; B5701
SYYLDREAW

SEQ ID NO: 26852 - protein, 9 aa, Homo sapiens
  AACR GENIE Results; SMAD4_p.G419W; B4403
SYYLDREAW

SEQ ID NO: 26853 - protein, 10 aa, Homo sapiens
  AACR GENIE Results; SMAD4_p.L389del; B4403
QECKGEGDVW

SEQ ID NO: 26854 - protein, 9 aa, Homo sapiens
  AACR GENIE Results; SMAD4_p.L43S; A1101
RAIESSVKK

SEQ ID NO: 26855 - protein, 8 aa, Homo sapiens
  AACR GENIE Results; SMAD4_p.L43S; B4403
IESSVKKL

SEQ ID NO: 26856 - protein, 9 aa, Homo sapiens
  AACR GENIE Results; SMAD4_p.L43S; A0301
RAIESSVKK

SEQ ID NO: 26857 - protein, 10 aa, Homo sapiens
  AACR GENIE Results; SMAD4_p.L43S; A0301
AIESSVKKLK

SEQ ID NO: 26858 - protein, 10 aa, Homo sapiens
  AACR GENIE Results; SMAD4_p.L43S; A1101
AIESSVKKLK

SEQ ID NO: 26859 - protein, 8 aa, Homo sapiens
  AACR GENIE Results; SMAD4_p.L43S; B1801
IESSVKKL

SEQ ID NO: 26860 - protein, 8 aa, Homo sapiens
  AACR GENIE Results; SMAD4_p.L43S; B4001
IESSVKKL

SEQ ID NO: 26861 - protein, 8 aa, Homo sapiens
  AACR GENIE Results; SMAD4_p.L43S; A2301
IESSVKKL

SEQ ID NO: 26862 - protein, 9 aa, Homo sapiens
  AACR GENIE Results; SMAD4_p.L43S; A6801
RAIESSVKK

SEQ ID NO: 26863 - protein, 9 aa, Homo sapiens
  AACR GENIE Results; SMAD4_p.L43S; A3001
RAIESSVKK

SEQ ID NO: 26864 - protein, 8 aa, Homo sapiens
  AACR GENIE Results; SMAD4_p.L43S; A0301
RAIESSVK

SEQ ID NO: 26865 - protein, 8 aa, Homo sapiens
  AACR GENIE Results; SMAD4_p.L43S; A1101
RAIESSVK

SEQ ID NO: 26866 - protein, 8 aa, Homo sapiens
  AACR GENIE Results; SMAD4_p.L43S; B4402
IESSVKKL

SEQ ID NO: 26867 - protein, 8 aa, Homo sapiens
  AACR GENIE Results; SMAD4_p.L43S; B0702
IESSVKKL

SEQ ID NO: 26868 - protein, 11 aa, Homo sapiens
  AACR GENIE Results; SMAD4_p.L495P; B2702
AAAGIGVDDPR

SEQ ID NO: 26869 - protein, 10 aa, Homo sapiens
  AACR GENIE Results; SMAD4_p.L495P; B2702
AAGIGVDDPR

SEQ ID NO: 26870 - protein, 11 aa, Homo sapiens
  AACR GENIE Results; SMAD4_p.L495P; A6801
AAAGIGVDDPR

SEQ ID NO: 26871 - protein, 8 aa, Homo sapiens
  AACR GENIE Results; SMAD4_p.L495P; C0501
GVDDPRRL

SEQ ID NO: 26872 - protein, 11 aa, Homo sapiens
  AACR GENIE Results; SMAD4_p.L495P; A6802
AAAGIGVDDPR

SEQ ID NO: 26873 - protein, 9 aa, Homo sapiens
  AACR GENIE Results; SMAD4_p.L495P; B2702
AGIGVDDPR

SEQ ID NO: 26874 - protein, 9 aa, Homo sapiens
  AACR GENIE Results; SMAD4_p.L495P; A6801
AGIGVDDPR

SEQ ID NO: 26875 - protein, 8 aa, Homo sapiens
  AACR GENIE Results; SMAD4_p.L495P; C0802
GVDDPRRL

SEQ ID NO: 26876 - protein, 10 aa, Homo sapiens
  AACR GENIE Results; SMAD4_p.L495P; A6801
AAGIGVDDPR

SEQ ID NO: 26877 - protein, 10 aa, Homo sapiens
  AACR GENIE Results; SMAD4_p.L529_H530delinsY; A2601
ETPCWIEIHY

SEQ ID NO: 26878 - protein, 9 aa, Homo sapiens
  AACR GENIE Results; SMAD4_p.L529_H530delinsY; B0801
EIHYRALQL

SEQ ID NO: 26879 - protein, 9 aa, Homo sapiens
  AACR GENIE Results; SMAD4_p.L529_H530delinsY; B3501
TPCWIEIHY

SEQ ID NO: 26880 - protein, 8 aa, Homo sapiens
  AACR GENIE Results; SMAD4_p.P356L; C0501
TVDGYVDL

SEQ ID NO: 26881 - protein, 10 aa, Homo sapiens
  AACR GENIE Results; SMAD4_p.P356L; C0501
YVDLSGGDRF

SEQ ID NO: 26882 - protein, 11 aa, Homo sapiens
  AACR GENIE Results; SMAD4_p.P356L; A2301
GYVDLSGGDRF

SEQ ID NO: 26883 - protein, 11 aa, Homo sapiens
  AACR GENIE Results; SMAD4_p.P356L; B3801
GYVDLSGGDRF

SEQ ID NO: 26884 - protein, 10 aa, Homo sapiens
  AACR GENIE Results; SMAD4_p.P356L; B3801
YVDLSGGDRF

SEQ ID NO: 26885 - protein, 10 aa, Homo sapiens
  AACR GENIE Results; SMAD4_p.P356L; C0802
YVDLSGGDRF

SEQ ID NO: 26886 - protein, 8 aa, Homo sapiens
  AACR GENIE Results; SMAD4_p.P356L; C0802
TVDGYVDL

SEQ ID NO: 26887 - protein, 11 aa, Homo sapiens
  AACR GENIE Results; SMAD4_p.P356L; B3901
GYVDLSGGDRF

SEQ ID NO: 26888 - protein, 11 aa, Homo sapiens
  AACR GENIE Results; SMAD4_p.P356L; A2402
GYVDLSGGDRF

SEQ ID NO: 26889 - protein, 10 aa, Homo sapiens
  AACR GENIE Results; SMAD4_p.P356S; B3801
YVDSSGGDRF

SEQ ID NO: 26890 - protein, 10 aa, Homo sapiens
  AACR GENIE Results; SMAD4_p.P356S; B3901
YVDSSGGDRF

SEQ ID NO: 26891 - protein, 10 aa, Homo sapiens
  AACR GENIE Results; SMAD4_p.P356S; C0501
YVDSSGGDRF

SEQ ID NO: 26892 - protein, 10 aa, Homo sapiens
  AACR GENIE Results; SMAD4_p.P356S; C0802
YVDSSGGDRF

SEQ ID NO: 26893 - protein, 11 aa, Homo sapiens
  AACR GENIE Results; SMAD4_p.P356S; B3901
GYVDSSGGDRF

SEQ ID NO: 26894 - protein, 11 aa, Homo sapiens
  AACR GENIE Results; SMAD4_p.P356S; B3801
GYVDSSGGDRF

SEQ ID NO: 26895 - protein, 10 aa, Homo sapiens
  AACR GENIE Results; SMAD4_p.P356S; A0101
YVDSSGGDRF

SEQ ID NO: 26896 - protein, 11 aa, Homo sapiens
  AACR GENIE Results; SMAD4_p.P356S; A2301
GYVDSSGGDRF

SEQ ID NO: 26897 - protein, 10 aa, Homo sapiens
  AACR GENIE Results; SMAD4_p.P356S; B3501
YVDSSGGDRF

SEQ ID NO: 26898 - protein, 9 aa, Homo sapiens
  AACR GENIE Results; SMAD4_p.P356S; B3801
VDSSGGDRF

SEQ ID NO: 26899 - protein, 10 aa, Homo sapiens
  AACR GENIE Results; SMAD4_p.P356S; B3503
YVDSSGGDRF

SEQ ID NO: 26900 - protein, 11 aa, Homo sapiens
  AACR GENIE Results; SMAD4_p.P356S; A2402
GYVDSSGGDRF

SEQ ID NO: 26901 - protein, 10 aa, Homo sapiens
  AACR GENIE Results; SMAD4_p.R361C; B3801
YVDPSGGDCF

SEQ ID NO: 26902 - protein, 10 aa, Homo sapiens
  AACR GENIE Results; SMAD4_p.R361C; B3502
YVDPSGGDCF

SEQ ID NO: 26903 - protein, 10 aa, Homo sapiens
  AACR GENIE Results; SMAD4_p.R361C; B3901
YVDPSGGDCF

SEQ ID NO: 26904 - protein, 10 aa, Homo sapiens
  AACR GENIE Results; SMAD4_p.R361C; A0206
YVDPSGGDCF

SEQ ID NO: 26905 - protein, 10 aa, Homo sapiens
  AACR GENIE Results; SMAD4_p.R361C; C0801
YVDPSGGDCF

SEQ ID NO: 26906 - protein, 10 aa, Homo sapiens
  AACR GENIE Results; SMAD4_p.R361C; B3503
YVDPSGGDCF

SEQ ID NO: 26907 - protein, 10 aa, Homo sapiens
  AACR GENIE Results; SMAD4_p.R361C; C0501
YVDPSGGDCF

SEQ ID NO: 26908 - protein, 10 aa, Homo sapiens
  AACR GENIE Results; SMAD4_p.R361C; C0802
YVDPSGGDCF

SEQ ID NO: 26909 - protein, 10 aa, Homo sapiens
  AACR GENIE Results; SMAD4_p.R361C; B5801
YVDPSGGDCF

SEQ ID NO: 26910 - protein, 10 aa, Homo sapiens
  AACR GENIE Results; SMAD4_p.R361C; B1502
YVDPSGGDCF

SEQ ID NO: 26911 - protein, 10 aa, Homo sapiens
  AACR GENIE Results; SMAD4_p.R361C; A0205
YVDPSGGDCF

SEQ ID NO: 26912 - protein, 11 aa, Homo sapiens
  AACR GENIE Results; SMAD4_p.R361C; B3901
GYVDPSGGDCF

SEQ ID NO: 26913 - protein, 10 aa, Homo sapiens
  AACR GENIE Results; SMAD4_p.R361C; B3501
YVDPSGGDCF

SEQ ID NO: 26914 - protein, 11 aa, Homo sapiens
  AACR GENIE Results; SMAD4_p.R361C; B3801
GYVDPSGGDCF

SEQ ID NO: 26915 - protein, 10 aa, Homo sapiens
  AACR GENIE Results; SMAD4_p.R361C; A0101
YVDPSGGDCF

SEQ ID NO: 26916 - protein, 11 aa, Homo sapiens
  AACR GENIE Results; SMAD4_p.R361C; A2301
GYVDPSGGDCF

SEQ ID NO: 26917 - protein, 10 aa, Homo sapiens
  AACR GENIE Results; SMAD4_p.R361C; B1501
YVDPSGGDCF

SEQ ID NO: 26918 - protein, 10 aa, Homo sapiens
  AACR GENIE Results; SMAD4_p.R361C; C0304
YVDPSGGDCF

SEQ ID NO: 26919 - protein, 10 aa, Homo sapiens
  AACR GENIE Results; SMAD4_p.R361C; C1701
YVDPSGGDCF

SEQ ID NO: 26920 - protein, 11 aa, Homo sapiens
  AACR GENIE Results; SMAD4_p.R361C; A2402
GYVDPSGGDCF

SEQ ID NO: 26921 - protein, 9 aa, Homo sapiens
  AACR GENIE Results; SMAD4_p.R361C; C0802
YVDPSGGDC

SEQ ID NO: 26922 - protein, 10 aa, Homo sapiens
  AACR GENIE Results; SMAD4_p.R361C; C0303
YVDPSGGDCF

SEQ ID NO: 26923 - protein, 10 aa, Homo sapiens
  AACR GENIE Results; SMAD4_p.R361G; B3801
YVDPSGGDGF

SEQ ID NO: 26924 - protein, 10 aa, Homo sapiens
  AACR GENIE Results; SMAD4_p.R361G; B3508
YVDPSGGDGF

SEQ ID NO: 26925 - protein, 10 aa, Homo sapiens
  AACR GENIE Results; SMAD4_p.R361G; B3901
YVDPSGGDGF

SEQ ID NO: 26926 - protein, 10 aa, Homo sapiens
  AACR GENIE Results; SMAD4_p.R361G; C0501
YVDPSGGDGF

SEQ ID NO: 26927 - protein, 11 aa, Homo sapiens
  AACR GENIE Results; SMAD4_p.R361G; B3901
GYVDPSGGDGF

SEQ ID NO: 26928 - protein, 10 aa, Homo sapiens
  AACR GENIE Results; SMAD4_p.R361G; B3502
YVDPSGGDGF

SEQ ID NO: 26929 - protein, 10 aa, Homo sapiens
  AACR GENIE Results; SMAD4_p.R361G; A0206
YVDPSGGDGF

SEQ ID NO: 26930 - protein, 10 aa, Homo sapiens
  AACR GENIE Results; SMAD4_p.R361G; C0802
YVDPSGGDGF

SEQ ID NO: 26931 - protein, 10 aa, Homo sapiens
  AACR GENIE Results; SMAD4_p.R361G; A0207
YVDPSGGDGF

SEQ ID NO: 26932 - protein, 10 aa, Homo sapiens
  AACR GENIE Results; SMAD4_p.R361G; C0801
YVDPSGGDGF

SEQ ID NO: 26933 - protein, 11 aa, Homo sapiens
  AACR GENIE Results; SMAD4_p.R361G; B3801
GYVDPSGGDGF

SEQ ID NO: 26934 - protein, 10 aa, Homo sapiens
  AACR GENIE Results; SMAD4_p.R361G; A0101
YVDPSGGDGF

SEQ ID NO: 26935 - protein, 10 aa, Homo sapiens
  AACR GENIE Results; SMAD4_p.R361G; B3503
YVDPSGGDGF

SEQ ID NO: 26936 - protein, 10 aa, Homo sapiens
  AACR GENIE Results; SMAD4_p.R361G; B3501
YVDPSGGDGF

SEQ ID NO: 26937 - protein, 10 aa, Homo sapiens
  AACR GENIE Results; SMAD4_p.R361G; B5801
YVDPSGGDGF

SEQ ID NO: 26938 - protein, 10 aa, Homo sapiens
  AACR GENIE Results; SMAD4_p.R361G; B1502
YVDPSGGDGF

SEQ ID NO: 26939 - protein, 11 aa, Homo sapiens
  AACR GENIE Results; SMAD4_p.R361G; A2301
GYVDPSGGDGF

SEQ ID NO: 26940 - protein, 10 aa, Homo sapiens
  AACR GENIE Results; SMAD4_p.R361G; B1501
YVDPSGGDGF

SEQ ID NO: 26941 - protein, 11 aa, Homo sapiens
  AACR GENIE Results; SMAD4_p.R361G; B2702
GYVDPSGGDGF

SEQ ID NO: 26942 - protein, 10 aa, Homo sapiens
  AACR GENIE Results; SMAD4_p.R361G; A0205
YVDPSGGDGF

SEQ ID NO: 26943 - protein, 11 aa, Homo sapiens
  AACR GENIE Results; SMAD4_p.R361G; B1503
GYVDPSGGDGF

SEQ ID NO: 26944 - protein, 11 aa, Homo sapiens
  AACR GENIE Results; SMAD4_p.R361G; A2402
GYVDPSGGDGF

SEQ ID NO: 26945 - protein, 9 aa, Homo sapiens
  AACR GENIE Results; SMAD4_p.R361G; B3801
VDPSGGDGF

SEQ ID NO: 26946 - protein, 10 aa, Homo sapiens
  AACR GENIE Results; SMAD4_p.R361H; B3801
YVDPSGGDHF

SEQ ID NO: 26947 - protein, 10 aa, Homo sapiens
  AACR GENIE Results; SMAD4_p.R361H; B3508
YVDPSGGDHF

SEQ ID NO: 26948 - protein, 10 aa, Homo sapiens
  AACR GENIE Results; SMAD4_p.R361H; C0501
YVDPSGGDHF

SEQ ID NO: 26949 - protein, 10 aa, Homo sapiens
  AACR GENIE Results; SMAD4_p.R361H; B3901
YVDPSGGDHF

SEQ ID NO: 26950 - protein, 10 aa, Homo sapiens
  AACR GENIE Results; SMAD4_p.R361H; C0802
YVDPSGGDHF

SEQ ID NO: 26951 - protein, 10 aa, Homo sapiens
  AACR GENIE Results; SMAD4_p.R361H; B3502
YVDPSGGDHF

SEQ ID NO: 26952 - protein, 10 aa, Homo sapiens
  AACR GENIE Results; SMAD4_p.R361H; A0207
YVDPSGGDHF

SEQ ID NO: 26953 - protein, 11 aa, Homo sapiens
  AACR GENIE Results; SMAD4_p.R361H; B3801
GYVDPSGGDHF

SEQ ID NO: 26954 - protein, 10 aa, Homo sapiens
  AACR GENIE Results; SMAD4_p.R361H; C0801
YVDPSGGDHF

SEQ ID NO: 26955 - protein, 11 aa, Homo sapiens
  AACR GENIE Results; SMAD4_p.R361H; B3901
GYVDPSGGDHF

SEQ ID NO: 26956 - protein, 11 aa, Homo sapiens
  AACR GENIE Results; SMAD4_p.R361H; A0201
YVDPSGGDHFC

SEQ ID NO: 26957 - protein, 11 aa, Homo sapiens
  AACR GENIE Results; SMAD4_p.R361H; A2301
GYVDPSGGDHF

SEQ ID NO: 26958 - protein, 10 aa, Homo sapiens
  AACR GENIE Results; SMAD4_p.R361H; B5801
YVDPSGGDHF

SEQ ID NO: 26959 - protein, 10 aa, Homo sapiens
  AACR GENIE Results; SMAD4_p.R361H; A0206
YVDPSGGDHF

SEQ ID NO: 26960 - protein, 10 aa, Homo sapiens
  AACR GENIE Results; SMAD4_p.R361H; B3503
YVDPSGGDHF

SEQ ID NO: 26961 - protein, 10 aa, Homo sapiens
  AACR GENIE Results; SMAD4_p.R361H; B3501
YVDPSGGDHF

SEQ ID NO: 26962 - protein, 10 aa, Homo sapiens
  AACR GENIE Results; SMAD4_p.R361H; A0101
YVDPSGGDHF

SEQ ID NO: 26963 - protein, 10 aa, Homo sapiens
  AACR GENIE Results; SMAD4_p.R361H; A0205
YVDPSGGDHF

SEQ ID NO: 26964 - protein, 10 aa, Homo sapiens
  AACR GENIE Results; SMAD4_p.R361H; B1502
YVDPSGGDHF

SEQ ID NO: 26965 - protein, 11 aa, Homo sapiens
  AACR GENIE Results; SMAD4_p.R361H; A2402
GYVDPSGGDHF

SEQ ID NO: 26966 - protein, 9 aa, Homo sapiens
  AACR GENIE Results; SMAD4_p.R361H; B3801
VDPSGGDHF

SEQ ID NO: 26967 - protein, 9 aa, Homo sapiens
  AACR GENIE Results; SMAD4_p.R361H; B3901
YVDPSGGDH

SEQ ID NO: 26968 - protein, 8 aa, Homo sapiens
  AACR GENIE Results; SMAD4_p.R361H; B3906
DHFCLGQL

SEQ ID NO: 26969 - protein, 11 aa, Homo sapiens
  AACR GENIE Results; SMAD4_p.R361H; A0206
YVDPSGGDHFC

SEQ ID NO: 26970 - protein, 10 aa, Homo sapiens
  AACR GENIE Results; SMAD4_p.R361H; B1501
YVDPSGGDHF

SEQ ID NO: 26971 - protein, 9 aa, Homo sapiens
  AACR GENIE Results; SMAD4_p.R361L; C0802
YVDPSGGDL

SEQ ID NO: 26972 - protein, 10 aa, Homo sapiens
  AACR GENIE Results; SMAD4_p.R361L; C0501
YVDPSGGDLF

SEQ ID NO: 26973 - protein, 9 aa, Homo sapiens
  AACR GENIE Results; SMAD4_p.R361L; C0501
YVDPSGGDL

SEQ ID NO: 26974 - protein, 11 aa, Homo sapiens
  AACR GENIE Results; SMAD4_p.R361L; A2402
GYVDPSGGDLF

SEQ ID NO: 26975 - protein, 10 aa, Homo sapiens
  AACR GENIE Results; SMAD4_p.R361L; C0802
YVDPSGGDLF

SEQ ID NO: 26976 - protein, 10 aa, Homo sapiens
  AACR GENIE Results; SMAD4_p.R361L; A0101
YVDPSGGDLF

SEQ ID NO: 26977 - protein, 10 aa, Homo sapiens
  AACR GENIE Results; SMAD4_p.R361L; B3501
YVDPSGGDLF

SEQ ID NO: 26978 - protein, 9 aa, Homo sapiens
  AACR GENIE Results; SMAD4_p.R361L; C0304
YVDPSGGDL

SEQ ID NO: 26979 - protein, 10 aa, Homo sapiens
  AACR GENIE Results; SMAD4_p.R361L; B1501
YVDPSGGDLF

SEQ ID NO: 26980 - protein, 9 aa, Homo sapiens
  AACR GENIE Results; SMAD4_p.R361L; C0303
YVDPSGGDL

SEQ ID NO: 26981 - protein, 10 aa, Homo sapiens
  AACR GENIE Results; SMAD4_p.R361S; B3801
YVDPSGGDSF

SEQ ID NO: 26982 - protein, 10 aa, Homo sapiens
  AACR GENIE Results; SMAD4_p.R361S; C0802
YVDPSGGDSF

SEQ ID NO: 26983 - protein, 10 aa, Homo sapiens
  AACR GENIE Results; SMAD4_p.R361S; C0501
YVDPSGGDSF

SEQ ID NO: 26984 - protein, 10 aa, Homo sapiens
  AACR GENIE Results; SMAD4_p.R361S; B3501
YVDPSGGDSF

SEQ ID NO: 26985 - protein, 11 aa, Homo sapiens
  AACR GENIE Results; SMAD4_p.R361S; A2301
GYVDPSGGDSF

SEQ ID NO: 26986 - protein, 11 aa, Homo sapiens
  AACR GENIE Results; SMAD4_p.R361S; B3801
GYVDPSGGDSF

SEQ ID NO: 26987 - protein, 11 aa, Homo sapiens
  AACR GENIE Results; SMAD4_p.R361S; A2402
GYVDPSGGDSF

SEQ ID NO: 26988 - protein, 10 aa, Homo sapiens
  AACR GENIE Results; SMAD4_p.R361S; A0101
YVDPSGGDSF

SEQ ID NO: 26989 - protein, 10 aa, Homo sapiens
  AACR GENIE Results; SMAD4_p.R361S; B1501
YVDPSGGDSF

SEQ ID NO: 26990 - protein, 10 aa, Homo sapiens
  AACR GENIE Results; SMAD4_p.R361S; C0304
YVDPSGGDSF

SEQ ID NO: 26991 - protein, 9 aa, Homo sapiens
  AACR GENIE Results; SMAD4_p.R361S; B3801
VDPSGGDSF

SEQ ID NO: 26992 - protein, 11 aa, Homo sapiens
  AACR GENIE Results; SMAD4_p.R361S; B1501
GYVDPSGGDSF

SEQ ID NO: 26993 - protein, 10 aa, Homo sapiens
  AACR GENIE Results; SMAD4_p.R361S; C0303
YVDPSGGDSF

SEQ ID NO: 26994 - protein, 10 aa, Homo sapiens
  AACR GENIE Results; SMAD4_p.R361S; C0401
YVDPSGGDSF

SEQ ID NO: 26995 - protein, 9 aa, Homo sapiens
  AACR GENIE Results; SMAD4_p.R496H; A2301
IGVDDLHRL

SEQ ID NO: 26996 - protein, 9 aa, Homo sapiens
  AACR GENIE Results; SMAD4_p.T521I; B5101
YPRQSIKEI

SEQ ID NO: 26997 - protein, 9 aa, Homo sapiens
  AACR GENIE Results; SMAD4_p.T521I; B5701
QSIKEIPCW

SEQ ID NO: 26998 - protein, 9 aa, Homo sapiens
  AACR GENIE Results; SMAD4_p.T521I; B0702
YPRQSIKEI

SEQ ID NO: 26999 - protein, 9 aa, Homo sapiens
  AACR GENIE Results; SMAD4_p.T521I; B5501
YPRQSIKEI

SEQ ID NO: 27000 - protein, 10 aa, Homo sapiens
  AACR GENIE Results; SMAD4_p.V354G; C0501
YGDPSGGDRF

SEQ ID NO: 27001 - protein, 10 aa, Homo sapiens
  AACR GENIE Results; SMAD4_p.V354G; B3501
YGDPSGGDRF

SEQ ID NO: 27002 - protein, 10 aa, Homo sapiens
  AACR GENIE Results; SMAD4_p.V354G; C0802
YGDPSGGDRF

SEQ ID NO: 27003 - protein, 9 aa, Homo sapiens
  AACR GENIE Results; SMAD4_p.V354G; B0702
GDPSGGDRF

SEQ ID NO: 27004 - protein, 10 aa, Homo sapiens
  AACR GENIE Results; SMAD4_p.Y353C; B3801
CVDPSGGDRF

SEQ ID NO: 27005 - protein, 11 aa, Homo sapiens
  AACR GENIE Results; SMAD4_p.Y353C; B3801
GCVDPSGGDRF

SEQ ID NO: 27006 - protein, 10 aa, Homo sapiens
  AACR GENIE Results; SMAD4_p.Y353C; C0501
CVDPSGGDRF

SEQ ID NO: 27007 - protein, 11 aa, Homo sapiens
  AACR GENIE Results; SMAD4_p.Y353C; B1501
GCVDPSGGDRF

SEQ ID NO: 27008 - protein, 9 aa, Homo sapiens
  AACR GENIE Results; SMARCA4_p.D1127H; A0301
YLRLHGTTK

SEQ ID NO: 27009 - protein, 10 aa, Homo sapiens
  AACR GENIE Results; SMARCA4_p.D1188Y; B3501
NPHQDLQAQY

SEQ ID NO: 27010 - protein, 8 aa, Homo sapiens
  AACR GENIE Results; SMARCA4_p.D1188Y; B1501
HQDLQAQY

SEQ ID NO: 27011 - protein, 9 aa, Homo sapiens
  AACR GENIE Results; SMARCA4_p.E1083K; A0301
KLLDRILPK

SEQ ID NO: 27012 - protein, 9 aa, Homo sapiens
  AACR GENIE Results; SMARCA4_p.E1083K; C0602
YRASGKFKL

SEQ ID NO: 27013 - protein, 10 aa, Homo sapiens
  AACR GENIE Results; SMARCA4_p.E1083K; A0301
KLLDRILPKL

SEQ ID NO: 27014 - protein, 10 aa, Homo sapiens
  AACR GENIE Results; SMARCA4_p.E1083K; A0201
KLLDRILPKL

SEQ ID NO: 27015 - protein, 9 aa, Homo sapiens
  AACR GENIE Results; SMARCA4_p.E821K; A1101
STLSNWAYK

SEQ ID NO: 27016 - protein, 9 aa, Homo sapiens
  AACR GENIE Results; SMARCA4_p.E821K; A0301
STLSNWAYK

SEQ ID NO: 27017 - protein, 9 aa, Homo sapiens
  AACR GENIE Results; SMARCA4_p.E821K; A2402
TLSNWAYKF

SEQ ID NO: 27018 - protein, 9 aa, Homo sapiens
  AACR GENIE Results; SMARCA4_p.E882K; A0301
IVDKGHRMK

SEQ ID NO: 27019 - protein, 8 aa, Homo sapiens
  AACR GENIE Results; SMARCA4_p.E882K; C0501
IVDKGHRM

SEQ ID NO: 27020 - protein, 8 aa, Homo sapiens
  AACR GENIE Results; SMARCA4_p.E882K; C0802
IVDKGHRM

SEQ ID NO: 27021 - protein, 9 aa, Homo sapiens
  AACR GENIE Results; SMARCA4_p.E882K; A1101
IVDKGHRMK

SEQ ID NO: 27022 - protein, 9 aa, Homo sapiens
  AACR GENIE Results; SMARCA4_p.E882K; C0304
MIVDKGHRM

SEQ ID NO: 27023 - protein, 9 aa, Homo sapiens
  AACR GENIE Results; SMARCA4_p.G1159W; A3101
RAWGLGLNL

SEQ ID NO: 27024 - protein, 9 aa, Homo sapiens
  AACR GENIE Results; SMARCA4_p.G1160V; B0702
STRAGVLGL

SEQ ID NO: 27025 - protein, 9 aa, Homo sapiens
  AACR GENIE Results; SMARCA4_p.G1160V; B1501
STRAGVLGL

SEQ ID NO: 27026 - protein, 9 aa, Homo sapiens
  AACR GENIE Results; SMARCA4_p.G1160V; A0201
VLGLNLQSA

SEQ ID NO: 27027 - protein, 9 aa, Homo sapiens
  AACR GENIE Results; SMARCA4_p.G1162C; A3001
STRAGGLCL

SEQ ID NO: 27028 - protein, 9 aa, Homo sapiens
  AACR GENIE Results; SMARCA4_p.G1162C; B0702
STRAGGLCL

SEQ ID NO: 27029 - protein, 9 aa, Homo sapiens
  AACR GENIE Results; SMARCA4_p.I1214F; B1501
TVNSVEEKF

SEQ ID NO: 27030 - protein, 9 aa, Homo sapiens
  AACR GENIE Results; SMARCA4_p.I1214F; B3501
TVNSVEEKF

SEQ ID NO: 27031 - protein, 10 aa, Homo sapiens
  AACR GENIE Results; SMARCA4_p.I1214F; B4403
EEKFLAAAKY

SEQ ID NO: 27032 - protein, 8 aa, Homo sapiens
  AACR GENIE Results; SMARCA4_p.I1214F; B1801
VEEKFLAA

SEQ ID NO: 27033 - protein, 10 aa, Homo sapiens
  AACR GENIE Results; SMARCA4_p.I1214F; B4402
EEKFLAAAKY

SEQ ID NO: 27034 - protein, 9 aa, Homo sapiens
  AACR GENIE Results; SMARCA4_p.I1214F; B1801
VEEKFLAAA

SEQ ID NO: 27035 - protein, 11 aa, Homo sapiens
  AACR GENIE Results; SMARCA4_p.I1214F; A1101
SVEEKFLAAAK

SEQ ID NO: 27036 - protein, 9 aa, Homo sapiens
  AACR GENIE Results; SMARCA4_p.I1214F; A2601
TVNSVEEKF

SEQ ID NO: 27037 - protein, 9 aa, Homo sapiens
  AACR GENIE Results; SMARCA4_p.I1214F; A0201
FLAAAKYKL

SEQ ID NO: 27038 - protein, 9 aa, Homo sapiens
  AACR GENIE Results; SMARCA4_p.P913L; A0201
LLQNKLPEL

SEQ ID NO: 27039 - protein, 9 aa, Homo sapiens
  AACR GENIE Results; SMARCA4_p.P913L; A1101
LTGTLLQNK

SEQ ID NO: 27040 - protein, 10 aa, Homo sapiens
  AACR GENIE Results; SMARCA4_p.P913L; A0201
TLLQNKLPEL

SEQ ID NO: 27041 - protein, 11 aa, Homo sapiens
  AACR GENIE Results; SMARCA4_p.P913L; B0702
APRRLLLTGTL

SEQ ID NO: 27042 - protein, 10 aa, Homo sapiens
  AACR GENIE Results; SMARCA4_p.P913L; A0301
LLTGTLLQNK

SEQ ID NO: 27043 - protein, 8 aa, Homo sapiens
  AACR GENIE Results; SMARCA4_p.R973W; A0301
VLWPFLLR

SEQ ID NO: 27044 - protein, 10 aa, Homo sapiens
  AACR GENIE Results; SMARCA4_p.T910M; A0301
LLMGTPLQNK

SEQ ID NO: 27045 - protein, 9 aa, Homo sapiens
  AACR GENIE Results; SMARCA4_p.T910M; A0301
LMGTPLQNK

SEQ ID NO: 27046 - protein, 9 aa, Homo sapiens
  AACR GENIE Results; SMARCA4_p.T910M; A1101
LMGTPLQNK

SEQ ID NO: 27047 - protein, 10 aa, Homo sapiens
  AACR GENIE Results; SMARCA4_p.T910M; A1101
LLMGTPLQNK

SEQ ID NO: 27048 - protein, 10 aa, Homo sapiens
  AACR GENIE Results; SMARCA4_p.T910M; B2702
LLMGTPLQNK

SEQ ID NO: 27049 - protein, 10 aa, Homo sapiens
  AACR GENIE Results; SMARCA4_p.T910M; A6802
LLMGTPLQNK

SEQ ID NO: 27050 - protein, 9 aa, Homo sapiens
  AACR GENIE Results; SMARCA4_p.T910M; B3503
MGTPLQNKL

SEQ ID NO: 27051 - protein, 9 aa, Homo sapiens
  AACR GENIE Results; SMARCB1_p.R377H; B5701
HLANTAPAW

SEQ ID NO: 27052 - protein, 9 aa, Homo sapiens
  AACR GENIE Results; SMARCB1_p.R377H; B3501
HLANTAPAW

SEQ ID NO: 27053 - protein, 9 aa, Homo sapiens
  AACR GENIE Results; SMARCB1_p.R377H; A3201
HLANTAPAW

SEQ ID NO: 27054 - protein, 10 aa, Homo sapiens
  AACR GENIE Results; SMARCB1_p.R377H; B5701
RHLANTAPAW

SEQ ID NO: 27055 - protein, 9 aa, Homo sapiens
  AACR GENIE Results; SMARCB1_p.R377H; B4403
HLANTAPAW

SEQ ID NO: 27056 - protein, 9 aa, Homo sapiens
  AACR GENIE Results; SMARCB1_p.R377H; A0301
HLANTAPAW

SEQ ID NO: 27057 - protein, 9 aa, Homo sapiens
  AACR GENIE Results; SMARCB1_p.R377H; B1501
HLANTAPAW

SEQ ID NO: 27058 - protein, 9 aa, Homo sapiens
  AACR GENIE Results; SMARCB1_p.R377H; A2601
HLANTAPAW

SEQ ID NO: 27059 - protein, 9 aa, Homo sapiens
  AACR GENIE Results; SMARCB1_p.R40Q; A0301
RMFQGSLYK

SEQ ID NO: 27060 - protein, 9 aa, Homo sapiens
  AACR GENIE Results; SMARCB1_p.R40Q; A1101
RMFQGSLYK

SEQ ID NO: 27061 - protein, 8 aa, Homo sapiens
  AACR GENIE Results; SMARCB1_p.R40Q; B1501
RMFQGSLY

SEQ ID NO: 27062 - protein, 8 aa, Homo sapiens
  AACR GENIE Results; SMARCB1_p.R40Q; A0301
RMFQGSLY

SEQ ID NO: 27063 - protein, 8 aa, Homo sapiens
  AACR GENIE Results; SMO_p.E194K; B1302
GQCKVPLV

SEQ ID NO: 27064 - protein, 8 aa, Homo sapiens
  AACR GENIE Results; SOX9_p.A118T; A6801
MVWAQTAR

SEQ ID NO: 27065 - protein, 8 aa, Homo sapiens
  AACR GENIE Results; SOX9_p.E293Rfs*3; A2601
ETFDVNRV

SEQ ID NO: 27066 - protein, 9 aa, Homo sapiens
  AACR GENIE Results; SOX9_p.E293Rfs*3; B4001
IETFDVNRV

SEQ ID NO: 27067 - protein, 8 aa, Homo sapiens
  AACR GENIE Results; SOX9_p.E293Rfs*3; B5101
ETFDVNRV

SEQ ID NO: 27068 - protein, 8 aa, Homo sapiens
  AACR GENIE Results; SOX9_p.E293Rfs*3; A6801
ETFDVNRV

SEQ ID NO: 27069 - protein, 9 aa, Homo sapiens
  AACR GENIE Results; SOX9_p.E293Rfs*3; B4403
IETFDVNRV

SEQ ID NO: 27070 - protein, 9 aa, Homo sapiens
  AACR GENIE Results; SOX9_p.E293Rfs*3; B1302
IETFDVNRV

SEQ ID NO: 27071 - protein, 10 aa, Homo sapiens
  AACR GENIE Results; SOX9_p.E293Rfs*3; A6801
SNIETFDVNR

SEQ ID NO: 27072 - protein, 9 aa, Homo sapiens
  AACR GENIE Results; SOX9_p.E293Rfs*3; A0201
IETFDVNRV

SEQ ID NO: 27073 - protein, 9 aa, Homo sapiens
  AACR GENIE Results; SOX9_p.E293Rfs*3; A6801
NIETFDVNR

SEQ ID NO: 27074 - protein, 10 aa, Homo sapiens
  AACR GENIE Results; SOX9_p.E293Rfs*3; A6801
NIETFDVNRV

SEQ ID NO: 27075 - protein, 9 aa, Homo sapiens
  AACR GENIE Results; SOX9_p.E293Rfs*3; A2301
IETFDVNRV

SEQ ID NO: 27076 - protein, 8 aa, Homo sapiens
  AACR GENIE Results; SOX9_p.E293Rfs*3; B1302
ETFDVNRV

SEQ ID NO: 27077 - protein, 8 aa, Homo sapiens
  AACR GENIE Results; SOX9_p.E293Rfs*3; B1801
ETFDVNRV

SEQ ID NO: 27078 - protein, 9 aa, Homo sapiens
  AACR GENIE Results; SOX9_p.E293Rfs*3; B3801
IETFDVNRV

SEQ ID NO: 27079 - protein, 8 aa, Homo sapiens
  AACR GENIE Results; SOX9_p.E293Rfs*3; C1203
ETFDVNRV

SEQ ID NO: 27080 - protein, 9 aa, Homo sapiens
  AACR GENIE Results; SOX9_p.E293Rfs*3; B1801
IETFDVNRV

SEQ ID NO: 27081 - protein, 11 aa, Homo sapiens
  AACR GENIE Results; SOX9_p.H380Rfs*4; A6801
PAAPPQQPQAR

SEQ ID NO: 27082 - protein, 10 aa, Homo sapiens
  AACR GENIE Results; SOX9_p.H380Rfs*4; A3303
AAPPQQPQAR

SEQ ID NO: 27083 - protein, 10 aa, Homo sapiens
  AACR GENIE Results; SOX9_p.H380Rfs*4; A6801
AAPPQQPQAR

SEQ ID NO: 27084 - protein, 9 aa, Homo sapiens
  AACR GENIE Results; SOX9_p.H380Rfs*4; A3303
APPQQPQAR

SEQ ID NO: 27085 - protein, 11 aa, Homo sapiens
  AACR GENIE Results; SOX9_p.H380Rfs*4; A3303
PAAPPQQPQAR

SEQ ID NO: 27086 - protein, 9 aa, Homo sapiens
  AACR GENIE Results; SOX9_p.P374Rfs*9; B0702
QPAAPRSSH

SEQ ID NO: 27087 - protein, 9 aa, Homo sapiens
  AACR GENIE Results; SOX9_p.P374Rfs*9; A6801
PPQQPAAPR

SEQ ID NO: 27088 - protein, 10 aa, Homo sapiens
  AACR GENIE Results; SOX9_p.P374Rfs*9; A6801
APPQQPAAPR

SEQ ID NO: 27089 - protein, 11 aa, Homo sapiens
  AACR GENIE Results; SOX9_p.P374Rfs*9; A6801
AAPPQQPAAPR

SEQ ID NO: 27090 - protein, 10 aa, Homo sapiens
  AACR GENIE Results; SOX9_p.Q246Cfs*8; A6801
TTPKTDVCSR

SEQ ID NO: 27091 - protein, 9 aa, Homo sapiens
  AACR GENIE Results; SOX9_p.R264T; A1101
GTQPPIDFR

SEQ ID NO: 27092 - protein, 10 aa, Homo sapiens
  AACR GENIE Results; SOX9_p.R264T; B0702
RPLPEGGTQP

SEQ ID NO: 27093 - protein, 10 aa, Homo sapiens
  AACR GENIE Results; SOX9_p.R271Afs*8; B5701
RQPPIDFATW

SEQ ID NO: 27094 - protein, 10 aa, Homo sapiens
  AACR GENIE Results; SOX9_p.R271Afs*8; A2402
RQPPIDFATW

SEQ ID NO: 27095 - protein, 10 aa, Homo sapiens
  AACR GENIE Results; SOX9_p.R271Afs*8; A2301
RQPPIDFATW

SEQ ID NO: 27096 - protein, 9 aa, Homo sapiens
  AACR GENIE Results; SRC_p.R509Q; B4001
KEPEEQPTF

SEQ ID NO: 27097 - protein, 9 aa, Homo sapiens
  AACR GENIE Results; SRC_p.R509Q; B4403
KEPEEQPTF

SEQ ID NO: 27098 - protein, 9 aa, Homo sapiens
  AACR GENIE Results; SRC_p.R509Q; B4402
KEPEEQPTF

SEQ ID NO: 27099 - protein, 9 aa, Homo sapiens
  AACR GENIE Results; SRC_p.R509Q; B1501
KEPEEQPTF

SEQ ID NO: 27100 - protein, 8 aa, Homo sapiens
  AACR GENIE Results; SRC_p.R509Q; B1801
EEQPTFEY

SEQ ID NO: 27101 - protein, 9 aa, Homo sapiens
  AACR GENIE Results; SRC_p.R509Q; A2301
KEPEEQPTF

SEQ ID NO: 27102 - protein, 9 aa, Homo sapiens
  AACR GENIE Results; SRC_p.R509Q; B4403
EEQPTFEYL

SEQ ID NO: 27103 - protein, 9 aa, Homo sapiens
  AACR GENIE Results; SRC_p.R509Q; B4001
EEQPTFEYL

SEQ ID NO: 27104 - protein, 9 aa, Homo sapiens
  AACR GENIE Results; SRC_p.R509Q; B4402
EEQPTFEYL

SEQ ID NO: 27105 - protein, 10 aa, Homo sapiens
  AACR GENIE Results; SRC_p.R509Q; B3501
EPEEQPTFEY

SEQ ID NO: 27106 - protein, 9 aa, Homo sapiens
  AACR GENIE Results; SRC_p.R509Q; B0702
KEPEEQPTF

SEQ ID NO: 27107 - protein, 8 aa, Homo sapiens
  AACR GENIE Results; SRC_p.R509Q; B3501
EPEEQPTF

SEQ ID NO: 27108 - protein, 11 aa, Homo sapiens
  AACR GENIE Results; SRC_p.R509Q; B4403
KEPEEQPTFEY

SEQ ID NO: 27109 - protein, 9 aa, Homo sapiens
  AACR GENIE Results; SRC_p.R509Q; A2402
KEPEEQPTF

SEQ ID NO: 27110 - protein, 9 aa, Homo sapiens
  AACR GENIE Results; STAG2_p.S853I; B1801
DEAIKIEAL

SEQ ID NO: 27111 - protein, 11 aa, Homo sapiens
  AACR GENIE Results; STAG2_p.S853I; B4001
QEDEAIKIEAL

SEQ ID NO: 27112 - protein, 9 aa, Homo sapiens
  AACR GENIE Results; STAG2_p.S853I; B4001
DEAIKIEAL

SEQ ID NO: 27113 - protein, 8 aa, Homo sapiens
  AACR GENIE Results; STAG2_p.S853I; B0801
EAIKIEAL

SEQ ID NO: 27114 - protein, 9 aa, Homo sapiens
  AACR GENIE Results; STAG2_p.S853I; B0801
DEAIKIEAL

SEQ ID NO: 27115 - protein, 8 aa, Homo sapiens
  AACR GENIE Results; STAG2_p.S853I; B4001
QEDEAIKI

SEQ ID NO: 27116 - protein, 8 aa, Homo sapiens
  AACR GENIE Results; STAG2_p.S853I; B3501
EAIKIEAL

SEQ ID NO: 27117 - protein, 8 aa, Homo sapiens
  AACR GENIE Results; STAG2_p.S853I; A2601
EAIKIEAL

SEQ ID NO: 27118 - protein, 8 aa, Homo sapiens
  AACR GENIE Results; STAG2_p.S853I; B1801
DEAIKIEA

SEQ ID NO: 27119 - protein, 8 aa, Homo sapiens
  AACR GENIE Results; STAG2_p.S853I; B5101
EAIKIEAL

SEQ ID NO: 27120 - protein, 9 aa, Homo sapiens
  AACR GENIE Results; STAG2_p.S853I; A0301
AIKIEALHK

SEQ ID NO: 27121 - protein, 8 aa, Homo sapiens
  AACR GENIE Results; STAG2_p.S853I; B1801
EAIKIEAL

SEQ ID NO: 27122 - protein, 8 aa, Homo sapiens
  AACR GENIE Results; STAG2_p.S853I; B4403
QEDEAIKI

SEQ ID NO: 27123 - protein, 9 aa, Homo sapiens
  AACR GENIE Results; STAG2_p.S853I; B4403
DEAIKIEAL

SEQ ID NO: 27124 - protein, 8 aa, Homo sapiens
  AACR GENIE Results; STAG2_p.S853I; B0702
EAIKIEAL

SEQ ID NO: 27125 - protein, 9 aa, Homo sapiens
  AACR GENIE Results; STAG2_p.S853I; A2601
EAIKIEALH

SEQ ID NO: 27126 - protein, 11 aa, Homo sapiens
  AACR GENIE Results; STAG2_p.S853I; B4403
QEDEAIKIEAL

SEQ ID NO: 27127 - protein, 8 aa, Homo sapiens
  AACR GENIE Results; STAG2_p.S853I; B1501
EAIKIEAL

SEQ ID NO: 27128 - protein, 9 aa, Homo sapiens
  AACR GENIE Results; STAT3_p.E616G; B1501
SSKGGGVTF

SEQ ID NO: 27129 - protein, 11 aa, Homo sapiens
  AACR GENIE Results; STAT3_p.E616G; B4403
SESSKGGGVTF

SEQ ID NO: 27130 - protein, 11 aa, Homo sapiens
  AACR GENIE Results; STAT3_p.E616G; B5701
SSKGGGVTFTW

SEQ ID NO: 27131 - protein, 9 aa, Homo sapiens
  AACR GENIE Results; STAT3_p.E616G; B5701
KGGGVTFTW

SEQ ID NO: 27132 - protein, 11 aa, Homo sapiens
  AACR GENIE Results; STAT3_p.E616G; B4001
SESSKGGGVTF

SEQ ID NO: 27133 - protein, 9 aa, Homo sapiens
  AACR GENIE Results; STAT3_p.E616G; C0202
SSKGGGVTF

SEQ ID NO: 27134 - protein, 9 aa, Homo sapiens
  AACR GENIE Results; STAT3_p.E616G; B5701
SSKGGGVTF

SEQ ID NO: 27135 - protein, 11 aa, Homo sapiens
  AACR GENIE Results; STAT3_p.E616G; B4402
SESSKGGGVTF

SEQ ID NO: 27136 - protein, 11 aa, Homo sapiens
  AACR GENIE Results; STAT3_p.E616G; B1801
SESSKGGGVTF

SEQ ID NO: 27137 - protein, 9 aa, Homo sapiens
  AACR GENIE Results; STAT3_p.E616G; A3201
SSKGGGVTF

SEQ ID NO: 27138 - protein, 9 aa, Homo sapiens
  AACR GENIE Results; STAT3_p.E616G; C1203
SSKGGGVTF

SEQ ID NO: 27139 - protein, 11 aa, Homo sapiens
  AACR GENIE Results; STAT3_p.E616G; B1501
SESSKGGGVTF

SEQ ID NO: 27140 - protein, 9 aa, Homo sapiens
  AACR GENIE Results; STAT3_p.E616G; B0702
SSKGGGVTF

SEQ ID NO: 27141 - protein, 11 aa, Homo sapiens
  AACR GENIE Results; STAT3_p.E616G; B0702
SESSKGGGVTF

SEQ ID NO: 27142 - protein, 11 aa, Homo sapiens
  AACR GENIE Results; STAT3_p.E616G; A2301
SESSKGGGVTF

SEQ ID NO: 27143 - protein, 9 aa, Homo sapiens
  AACR GENIE Results; STAT3_p.E616G; C1601
SSKGGGVTF

SEQ ID NO: 27144 - protein, 10 aa, Homo sapiens
  AACR GENIE Results; STAT3_p.E616G; A6801
ESSKGGGVTF

SEQ ID NO: 27145 - protein, 8 aa, Homo sapiens
  AACR GENIE Results; STAT3_p.E616G; B5701
GGGVTFTW

SEQ ID NO: 27146 - protein, 10 aa, Homo sapiens
  AACR GENIE Results; STAT3_p.E616G; A2601
ESSKGGGVTF

SEQ ID NO: 27147 - protein, 9 aa, Homo sapiens
  AACR GENIE Results; STAT3_p.E616G; A2301
KGGGVTFTW

SEQ ID NO: 27148 - protein, 9 aa, Homo sapiens
  AACR GENIE Results; STAT3_p.E616G; C0304
SSKGGGVTF

SEQ ID NO: 27149 - protein, 10 aa, Homo sapiens
  AACR GENIE Results; STAT3_p.E616G; B1501
ESSKGGGVTF

SEQ ID NO: 27150 - protein, 9 aa, Homo sapiens
  AACR GENIE Results; STAT3_p.E616G; B4403
KGGGVTFTW

SEQ ID NO: 27151 - protein, 8 aa, Homo sapiens
  AACR GENIE Results; STK11_p.A206Rfs*81; B5101
VAPRSLTC

SEQ ID NO: 27152 - protein, 10 aa, Homo sapiens
  AACR GENIE Results; STK11_p.A206Rfs*81; B5701
SSRPRLPTAW

SEQ ID NO: 27153 - protein, 9 aa, Homo sapiens
  AACR GENIE Results; STK11_p.A206Rfs*81; C1601
RATVAPRSL

SEQ ID NO: 27154 - protein, 9 aa, Homo sapiens
  AACR GENIE Results; STK11_p.A206Rfs*81; B0702
SPSTTSPRV

SEQ ID NO: 27155 - protein, 9 aa, Homo sapiens
  AACR GENIE Results; STK11_p.A206Rfs*81; B0702
TPAGPARAP

SEQ ID NO: 27156 - protein, 9 aa, Homo sapiens
  AACR GENIE Results; STK11_p.A206Rfs*81; A1101
GTTSTSCLR

SEQ ID NO: 27157 - protein, 10 aa, Homo sapiens
  AACR GENIE Results; STK11_p.A206Rfs*81; A6801
TPSRATVAPR

SEQ ID NO: 27158 - protein, 9 aa, Homo sapiens
  AACR GENIE Results; STK11_p.D194Y; A2301
SYLGVAEAL

SEQ ID NO: 27159 - protein, 9 aa, Homo sapiens
  AACR GENIE Results; STK11_p.D194Y; A2402
SYLGVAEAL

SEQ ID NO: 27160 - protein, 9 aa, Homo sapiens
  AACR GENIE Results; STK11_p.D194Y; B3501
TGGTLKISY

SEQ ID NO: 27161 - protein, 10 aa, Homo sapiens
  AACR GENIE Results; STK11_p.D237Y; A2402
VYIWSAGVTL

SEQ ID NO: 27162 - protein, 10 aa, Homo sapiens
  AACR GENIE Results; STK11_p.D277Rfs*8; B5701
GSYAIPGRLW

SEQ ID NO: 27163 - protein, 10 aa, Homo sapiens
  AACR GENIE Results; STK11_p.D53Afs*11; A3101
ACWGKALTAR

SEQ ID NO: 27164 - protein, 10 aa, Homo sapiens
  AACR GENIE Results; STK11_p.D53Gfs*110; A6801
HPAGGCVIQR

SEQ ID NO: 27165 - protein, 10 aa, Homo sapiens
  AACR GENIE Results; STK11_p.D53Gfs*110; A1101
STTEEVTAQK

SEQ ID NO: 27166 - protein, 9 aa, Homo sapiens
  AACR GENIE Results; STK11_p.D53Gfs*110; A6801
NVYGDGVLR

SEQ ID NO: 27167 - protein, 11 aa, Homo sapiens
  AACR GENIE Results; STK11_p.D53Gfs*110; B5701
NVYGDGVLRVW

SEQ ID NO: 27168 - protein, 10 aa, Homo sapiens
  AACR GENIE Results; STK11_p.D53Gfs*110; A6801
EAFPSVPGPR

SEQ ID NO: 27169 - protein, 9 aa, Homo sapiens
  AACR GENIE Results; STK11_p.D53Gfs*110; A1101
TTEEVTAQK

SEQ ID NO: 27170 - protein, 10 aa, Homo sapiens
  AACR GENIE Results; STK11_p.D53Gfs*110; A6801
STTEEVTAQK

SEQ ID NO: 27171 - protein, 10 aa, Homo sapiens
  AACR GENIE Results; STK11_p.D53Gfs*110; B4001
AENVYGDGVL

SEQ ID NO: 27172 - protein, 9 aa, Homo sapiens
  AACR GENIE Results; STK11_p.D53Gfs*110; B5101
FPSVPGPRV

SEQ ID NO: 27173 - protein, 10 aa, Homo sapiens
  AACR GENIE Results; STK11_p.D53Gfs*110; B1501
IQRREAENVY

SEQ ID NO: 27174 - protein, 10 aa, Homo sapiens
  AACR GENIE Results; STK11_p.D53Gfs*110; A6801
ENVYGDGVLR

SEQ ID NO: 27175 - protein, 9 aa, Homo sapiens
  AACR GENIE Results; STK11_p.D53Gfs*110; A6801
TTEEVTAQK

SEQ ID NO: 27176 - protein, 9 aa, Homo sapiens
  AACR GENIE Results; STK11_p.D53Gfs*110; B5701
YGDGVLRVW

SEQ ID NO: 27177 - protein, 10 aa, Homo sapiens
  AACR GENIE Results; STK11_p.D53Gfs*110; A2402
VYGDGVLRVW

SEQ ID NO: 27178 - protein, 8 aa, Homo sapiens
  AACR GENIE Results; STK11_p.D53Gfs*110; B1501
GQRAGEAF

SEQ ID NO: 27179 - protein, 8 aa, Homo sapiens
  AACR GENIE Results; STK11_p.D53Gfs*110; B0702
GPAGGRLL

SEQ ID NO: 27180 - protein, 10 aa, Homo sapiens
  AACR GENIE Results; STK11_p.D53Gfs*110; B3501
NAGQRAGEAF

SEQ ID NO: 27181 - protein, 10 aa, Homo sapiens
  AACR GENIE Results; STK11_p.D53Pfs*109; A1101
STTEEVTAQK

SEQ ID NO: 27182 - protein, 9 aa, Homo sapiens
  AACR GENIE Results; STK11_p.D53Pfs*109; A1101
TTEEVTAQK

SEQ ID NO: 27183 - protein, 10 aa, Homo sapiens
  AACR GENIE Results; STK11_p.D53Pfs*109; A2402
VYGDGVLRVW

SEQ ID NO: 27184 - protein, 10 aa, Homo sapiens
  AACR GENIE Results; STK11_p.D53Pfs*109; B3501
NAGQRAGEAF

SEQ ID NO: 27185 - protein, 10 aa, Homo sapiens
  AACR GENIE Results; STK11_p.D53Tfs*11; A3101
TCWGKALTAR

SEQ ID NO: 27186 - protein, 11 aa, Homo sapiens
  AACR GENIE Results; STK11_p.D53Tfs*11; A3101
GTCWGKALTAR

SEQ ID NO: 27187 - protein, 9 aa, Homo sapiens
  AACR GENIE Results; STK11_p.E199D; B1501
GVADALHPF

SEQ ID NO: 27188 - protein, 8 aa, Homo sapiens
  AACR GENIE Results; STK11_p.E223Rfs*64; B5101
VAPRSLTC

SEQ ID NO: 27189 - protein, 9 aa, Homo sapiens
  AACR GENIE Results; STK11_p.E223Rfs*64; C1601
RATVAPRSL

SEQ ID NO: 27190 - protein, 9 aa, Homo sapiens
  AACR GENIE Results; STK11_p.E223Rfs*64; B0702
SPSTTSPRV

SEQ ID NO: 27191 - protein, 9 aa, Homo sapiens
  AACR GENIE Results; STK11_p.E223Rfs*64; A6802
TVAPRSLTC

SEQ ID NO: 27192 - protein, 9 aa, Homo sapiens
  AACR GENIE Results; STK11_p.E223Rfs*64; A1101
GTTSTSCLR

SEQ ID NO: 27193 - protein, 10 aa, Homo sapiens
  AACR GENIE Results; STK11_p.E223Rfs*64; A6801
TPSRATVAPR

SEQ ID NO: 27194 - protein, 9 aa, Homo sapiens
  AACR GENIE Results; STK11_p.E57Kfs*7; C0802
MGDLLGKAL

SEQ ID NO: 27195 - protein, 9 aa, Homo sapiens
  AACR GENIE Results; STK11_p.E57Kfs*7; B0801
DLLGKALTA

SEQ ID NO: 27196 - protein, 11 aa, Homo sapiens
  AACR GENIE Results; STK11_p.E57Kfs*7; A3101
GDLLGKALTAR

SEQ ID NO: 27197 - protein, 9 aa, Homo sapiens
  AACR GENIE Results; STK11_p.E57Kfs*7; A3101
LLGKALTAR

SEQ ID NO: 27198 - protein, 10 aa, Homo sapiens
  AACR GENIE Results; STK11_p.E57Kfs*7; A6801
DLLGKALTAR

SEQ ID NO: 27199 - protein, 9 aa, Homo sapiens
  AACR GENIE Results; STK11_p.E57Kfs*7; A0301
LLGKALTAR

SEQ ID NO: 27200 - protein, 9 aa, Homo sapiens
  AACR GENIE Results; STK11_p.G196Afs*91; A1101
RTTPAGPAR

SEQ ID NO: 27201 - protein, 9 aa, Homo sapiens
  AACR GENIE Results; STK11_p.G196Afs*91; B0702
TPAGPARAP

SEQ ID NO: 27202 - protein, 9 aa, Homo sapiens
  AACR GENIE Results; STK11_p.G196Afs*91; B0702
SPSTTSPRV

SEQ ID NO: 27203 - protein, 9 aa, Homo sapiens
  AACR GENIE Results; STK11_p.G196Afs*91; A1101
GTTSTSCLR

SEQ ID NO: 27204 - protein, 9 aa, Homo sapiens
  AACR GENIE Results; STK11_p.G196V; B1501
VVAEALHPF

SEQ ID NO: 27205 - protein, 9 aa, Homo sapiens
  AACR GENIE Results; STK11_p.G242V; A2902
IWSAVVTLY

SEQ ID NO: 27206 - protein, 9 aa, Homo sapiens
  AACR GENIE Results; STK11_p.G251C; A0201
TLYNITTCL

SEQ ID NO: 27207 - protein, 9 aa, Homo sapiens
  AACR GENIE Results; STK11_p.G251V; A0201
TLYNITTVL

SEQ ID NO: 27208 - protein, 10 aa, Homo sapiens
  AACR GENIE Results; STK11_p.G276Afs*11; B0702
IPATVAPRSL

SEQ ID NO: 27209 - protein, 9 aa, Homo sapiens
  AACR GENIE Results; STK11_p.G61D; C1203
GSYDKVKEV

SEQ ID NO: 27210 - protein, 8 aa, Homo sapiens
  AACR GENIE Results; STK11_p.G61D; B0801
YDKVKEVL

SEQ ID NO: 27211 - protein, 9 aa, Homo sapiens
  AACR GENIE Results; STK11_p.G61D; C0401
SYDKVKEVL

SEQ ID NO: 27212 - protein, 9 aa, Homo sapiens
  AACR GENIE Results; STK11_p.H154L; B3501
FPVCQALGY

SEQ ID NO: 27213 - protein, 9 aa, Homo sapiens
  AACR GENIE Results; STK11_p.I161F; A0201
QLFDGLEYL

SEQ ID NO: 27214 - protein, 8 aa, Homo sapiens
  AACR GENIE Results; STK11_p.N181Tfs*106; B5101
VAPRSLTC

SEQ ID NO: 27215 - protein, 9 aa, Homo sapiens
  AACR GENIE Results; STK11_p.N181Tfs*106; A1101
RTTPAGPAR

SEQ ID NO: 27216 - protein, 9 aa, Homo sapiens
  AACR GENIE Results; STK11_p.N181Tfs*106; B0702
TPAGPARAP

SEQ ID NO: 27217 - protein, 9 aa, Homo sapiens
  AACR GENIE Results; STK11_p.N181Tfs*106; B0702
SPSTTSPRV

SEQ ID NO: 27218 - protein, 9 aa, Homo sapiens
  AACR GENIE Results; STK11_p.N181Tfs*106; A1101
GTTSTSCLR

SEQ ID NO: 27219 - protein, 11 aa, Homo sapiens
  AACR GENIE Results; STK11_p.P221L; B3501
LPEIANGLDTF

SEQ ID NO: 27220 - protein, 8 aa, Homo sapiens
  AACR GENIE Results; STK11_p.P221L; B5101
PAFQLPEI

SEQ ID NO: 27221 - protein, 9 aa, Homo sapiens
  AACR GENIE Results; STK11_p.P221L; B5101
SPAFQLPEI

SEQ ID NO: 27222 - protein, 9 aa, Homo sapiens
  AACR GENIE Results; STK11_p.S216F; B5101
FPAFQPPEI

SEQ ID NO: 27223 - protein, 9 aa, Homo sapiens
  AACR GENIE Results; STK11_p.S216F; B3503
FPAFQPPEI

SEQ ID NO: 27224 - protein, 9 aa, Homo sapiens
  AACR GENIE Results; STK11_p.S216F; B5501
FPAFQPPEI

SEQ ID NO: 27225 - protein, 9 aa, Homo sapiens
  AACR GENIE Results; STK11_p.S216F; B3502
FPAFQPPEI

SEQ ID NO: 27226 - protein, 9 aa, Homo sapiens
  AACR GENIE Results; STK11_p.S216F; B3501
FPAFQPPEI

SEQ ID NO: 27227 - protein, 10 aa, Homo sapiens
  AACR GENIE Results; STK11_p.W239C; A2601
DICSAGVTLY

SEQ ID NO: 27228 - protein, 10 aa, Homo sapiens
  AACR GENIE Results; STK11_p.W239S; A2601
DISSAGVTLY

SEQ ID NO: 27229 - protein, 9 aa, Homo sapiens
  AACR GENIE Results; STK11_p.W239S; B1501
ISSAGVTLY

SEQ ID NO: 27230 - protein, 9 aa, Homo sapiens
  AACR GENIE Results; STK11_p.W239S; A0201
KVDISSAGV

SEQ ID NO: 27231 - protein, 8 aa, Homo sapiens
  AACR GENIE Results; STK11_p.W239S; B1501
SSAGVTLY

SEQ ID NO: 27232 - protein, 11 aa, Homo sapiens
  AACR GENIE Results; TCF3_p.E77K; A1101
SSFDPSRTFSK

SEQ ID NO: 27233 - protein, 11 aa, Homo sapiens
  AACR GENIE Results; TCF3_p.E77K; A0301
SSFDPSRTFSK

SEQ ID NO: 27234 - protein, 9 aa, Homo sapiens
  AACR GENIE Results; TCF3_p.E77K; B5701
RTFSKGTHF

SEQ ID NO: 27235 - protein, 9 aa, Homo sapiens
  AACR GENIE Results; TCF3_p.T168M; A1101
GSLDMQPKK

SEQ ID NO: 27236 - protein, 8 aa, Homo sapiens
  AACR GENIE Results; TCF3_p.T168M; C0802
AADGSLDM

SEQ ID NO: 27237 - protein, 11 aa, Homo sapiens
  AACR GENIE Results; TCF3_p.T168M; A1101
AADGSLDMQPK

SEQ ID NO: 27238 - protein, 9 aa, Homo sapiens
  AACR GENIE Results; TCF3_p.T168M; A0201
SLDMQPKKV

SEQ ID NO: 27239 - protein, 8 aa, Homo sapiens
  AACR GENIE Results; TCF3_p.T168M; C0501
AADGSLDM

SEQ ID NO: 27240 - protein, 11 aa, Homo sapiens
  AACR GENIE Results; TCF3_p.T168M; A3101
GSLDMQPKKVR

SEQ ID NO: 27241 - protein, 9 aa, Homo sapiens
  AACR GENIE Results; TERT_p.H752R; A6801
YAVVQKAAR

SEQ ID NO: 27242 - protein, 9 aa, Homo sapiens
  AACR GENIE Results; TERT_p.H752R; A3303
YAVVQKAAR

SEQ ID NO: 27243 - protein, 10 aa, Homo sapiens
  AACR GENIE Results; TERT_p.H752R; A3101
RYAVVQKAAR

SEQ ID NO: 27244 - protein, 8 aa, Homo sapiens
  AACR GENIE Results; TET1_p.P1818L; B4901
SETELHFI

SEQ ID NO: 27245 - protein, 9 aa, Homo sapiens
  AACR GENIE Results; TET1_p.P1818L; B4001
PEVKSETEL

SEQ ID NO: 27246 - protein, 11 aa, Homo sapiens
  AACR GENIE Results; TET2_p.G1861V; A0201
FLDPDIGVVAV

SEQ ID NO: 27247 - protein, 9 aa, Homo sapiens
  AACR GENIE Results; TET2_p.G1861V; A0201
FLDPDIGVV

SEQ ID NO: 27248 - protein, 9 aa, Homo sapiens
  AACR GENIE Results; TET2_p.G1861V; B5101
DPDIGVVAV

SEQ ID NO: 27249 - protein, 9 aa, Homo sapiens
  AACR GENIE Results; TET2_p.G1861V; B3501
DPDIGVVAV

SEQ ID NO: 27250 - protein, 10 aa, Homo sapiens
  AACR GENIE Results; TET2_p.G1861V; A0201
FLDPDIGVVA

SEQ ID NO: 27251 - protein, 8 aa, Homo sapiens
  AACR GENIE Results; TET2_p.G1861V; A0201
FLDPDIGV

SEQ ID NO: 27252 - protein, 8 aa, Homo sapiens
  AACR GENIE Results; TET2_p.G1861V; A1101
PDIGVVAV

SEQ ID NO: 27253 - protein, 9 aa, Homo sapiens
  AACR GENIE Results; TET2_p.G1861V; C0501
FLDPDIGVV

SEQ ID NO: 27254 - protein, 11 aa, Homo sapiens
  AACR GENIE Results; TET2_p.G1861V; C0501
FLDPDIGVVAV

SEQ ID NO: 27255 - protein, 9 aa, Homo sapiens
  AACR GENIE Results; TET2_p.S1611Y; B3501
QAAGSYLNY

SEQ ID NO: 27256 - protein, 9 aa, Homo sapiens
  AACR GENIE Results; TET2_p.S1611Y; B1501
QAAGSYLNY

SEQ ID NO: 27257 - protein, 10 aa, Homo sapiens
  AACR GENIE Results; TET2_p.S1611Y; B1501
SQAAGSYLNY

SEQ ID NO: 27258 - protein, 9 aa, Homo sapiens
  AACR GENIE Results; TET2_p.S1611Y; A2601
QAAGSYLNY

SEQ ID NO: 27259 - protein, 9 aa, Homo sapiens
  AACR GENIE Results; TET2_p.S1611Y; A2902
QAAGSYLNY

SEQ ID NO: 27260 - protein, 10 aa, Homo sapiens
  AACR GENIE Results; TET2_p.S1611Y; A2601
SQAAGSYLNY

SEQ ID NO: 27261 - protein, 9 aa, Homo sapiens
  AACR GENIE Results; TET2_p.S1611Y; A6801
QAAGSYLNY

SEQ ID NO: 27262 - protein, 10 aa, Homo sapiens
  AACR GENIE Results; TET2_p.S1611Y; A1101
GSYLNYSNPM

SEQ ID NO: 27263 - protein, 9 aa, Homo sapiens
  AACR GENIE Results; TET2_p.S1611Y; A0101
QAAGSYLNY

SEQ ID NO: 27264 - protein, 9 aa, Homo sapiens
  AACR GENIE Results; TET2_p.S1611Y; A0301
QAAGSYLNY

SEQ ID NO: 27265 - protein, 10 aa, Homo sapiens
  AACR GENIE Results; TGFBR1_p.A202V; B5101
LPLLVQRTIV

SEQ ID NO: 27266 - protein, 9 aa, Homo sapiens
  AACR GENIE Results; TGFBR1_p.R487W; A0301
RLTALWIKK

SEQ ID NO: 27267 - protein, 11 aa, Homo sapiens
  AACR GENIE Results; TGFBR1_p.S241L; B5701
KIFSSREERLW

SEQ ID NO: 27268 - protein, 9 aa, Homo sapiens
  AACR GENIE Results; TGFBR1_p.S241L; B5701
FSSREERLW

SEQ ID NO: 27269 - protein, 8 aa, Homo sapiens
  AACR GENIE Results; TGFBR1_p.S241L; B5701
SSREERLW

SEQ ID NO: 27270 - protein, 9 aa, Homo sapiens
  AACR GENIE Results; TNFAIP3_p.I248V; C0602
YRYPVVLGY

SEQ ID NO: 27271 - protein, 9 aa, Homo sapiens
  AACR GENIE Results; TNFAIP3_p.I248V; C0702
YRYPVVLGY

SEQ ID NO: 27272 - protein, 9 aa, Homo sapiens
  AACR GENIE Results; TNFAIP3_p.I248V; A2902
YRYPVVLGY

SEQ ID NO: 27273 - protein, 9 aa, Homo sapiens
  AACR GENIE Results; TNFAIP3_p.I248V; B2702
YRYPVVLGY

SEQ ID NO: 27274 - protein, 9 aa, Homo sapiens
  AACR GENIE Results; TP53_p.A138P; B0702
LPKTCPVQL

SEQ ID NO: 27275 - protein, 9 aa, Homo sapiens
  AACR GENIE Results; TP53_p.A159P; A0301
RVRPMAIYK

SEQ ID NO: 27276 - protein, 9 aa, Homo sapiens
  AACR GENIE Results; TP53_p.A159P; A1101
RVRPMAIYK

SEQ ID NO: 27277 - protein, 9 aa, Homo sapiens
  AACR GENIE Results; TP53_p.A159P; A3101
RVRPMAIYK

SEQ ID NO: 27278 - protein, 9 aa, Homo sapiens
  AACR GENIE Results; TP53_p.A159V; A0301
RVRVMAIYK

SEQ ID NO: 27279 - protein, 11 aa, Homo sapiens
  AACR GENIE Results; TP53_p.A159V; A6802
STPPPGTRVRV

SEQ ID NO: 27280 - protein, 9 aa, Homo sapiens
  AACR GENIE Results; TP53_p.A161S; B1501
SIYKQSQHM

SEQ ID NO: 27281 - protein, 9 aa, Homo sapiens
  AACR GENIE Results; TP53_p.A161S; A0301
RVRAMSIYK

SEQ ID NO: 27282 - protein, 8 aa, Homo sapiens
  AACR GENIE Results; TP53_p.A161S; A0301
SIYKQSQH

SEQ ID NO: 27283 - protein, 9 aa, Homo sapiens
  AACR GENIE Results; TP53_p.A161S; B1302
SIYKQSQHM

SEQ ID NO: 27284 - protein, 9 aa, Homo sapiens
  AACR GENIE Results; TP53_p.A161T; A0301
RVRAMTIYK

SEQ ID NO: 27285 - protein, 9 aa, Homo sapiens
  AACR GENIE Results; TP53_p.A161T; B1501
TIYKQSQHM

SEQ ID NO: 27286 - protein, 9 aa, Homo sapiens
  AACR GENIE Results; TP53_p.A161T; B0801
TIYKQSQHM

SEQ ID NO: 27287 - protein, 9 aa, Homo sapiens
  AACR GENIE Results; TP53_p.A276F; B3501
NSFEVRVCF

SEQ ID NO: 27288 - protein, 9 aa, Homo sapiens
  AACR GENIE Results; TP53_p.A276F; B1501
NSFEVRVCF

SEQ ID NO: 27289 - protein, 9 aa, Homo sapiens
  AACR GENIE Results; TP53_p.A276F; C1203
NSFEVRVCF

SEQ ID NO: 27290 - protein, 9 aa, Homo sapiens
  AACR GENIE Results; TP53_p.A276F; C1601
NSFEVRVCF

SEQ ID NO: 27291 - protein, 9 aa, Homo sapiens
  AACR GENIE Results; TP53_p.A347V; B4001
RELNEVLEL

SEQ ID NO: 27292 - protein, 9 aa, Homo sapiens
  AACR GENIE Results; TP53_p.A347V; A3001
RELNEVLEL

SEQ ID NO: 27293 - protein, 9 aa, Homo sapiens
  AACR GENIE Results; TP53_p.A347V; B4403
RELNEVLEL

SEQ ID NO: 27294 - protein, 10 aa, Homo sapiens
  AACR GENIE Results; TP53_p.A347V; A6801
EVLELKDAQA

SEQ ID NO: 27295 - protein, 9 aa, Homo sapiens
  AACR GENIE Results; TP53_p.A347V; B4901
RELNEVLEL

SEQ ID NO: 27296 - protein, 9 aa, Homo sapiens
  AACR GENIE Results; TP53_p.A347V; A6801
ELNEVLELK

SEQ ID NO: 27297 - protein, 9 aa, Homo sapiens
  AACR GENIE Results; TP53_p.A347V; B2702
ELNEVLELK

SEQ ID NO: 27298 - protein, 9 aa, Homo sapiens
  AACR GENIE Results; TP53_p.A347V; A2301
RELNEVLEL

SEQ ID NO: 27299 - protein, 10 aa, Homo sapiens
  AACR GENIE Results; TP53_p.A347V; A2601
EVLELKDAQA

SEQ ID NO: 27300 - protein, 10 aa, Homo sapiens
  AACR GENIE Results; TP53_p.A70V; A0201
AVPPVAPAPA

SEQ ID NO: 27301 - protein, 9 aa, Homo sapiens
  AACR GENIE Results; TP53_p.A70V; B3501
MPEAVPPVA

SEQ ID NO: 27302 - protein, 9 aa, Homo sapiens
  AACR GENIE Results; TP53_p.A70V; A0201
RMPEAVPPV

SEQ ID NO: 27303 - protein, 8 aa, Homo sapiens
  AACR GENIE Results; TP53_p.A86Cfs*63; C0102
VLPTGQDL

SEQ ID NO: 27304 - protein, 8 aa, Homo sapiens
  AACR GENIE Results; TP53_p.A86Cfs*63; B5101
SPLLAPVI

SEQ ID NO: 27305 - protein, 9 aa, Homo sapiens
  AACR GENIE Results; TP53_p.A86Cfs*63; B3501
SPLLAPVIF

SEQ ID NO: 27306 - protein, 9 aa, Homo sapiens
  AACR GENIE Results; TP53_p.A86Cfs*63; B3501
LPCPQQDVL

SEQ ID NO: 27307 - protein, 9 aa, Homo sapiens
  AACR GENIE Results; TP53_p.A86Cfs*63; C0401
FWDSQVCDL

SEQ ID NO: 27308 - protein, 9 aa, Homo sapiens
  AACR GENIE Results; TP53_p.A86Cfs*63; A2301
RFPSGLLAF

SEQ ID NO: 27309 - protein, 11 aa, Homo sapiens
  AACR GENIE Results; TP53_p.A86Cfs*63; B3501
FPENLPGQLRF

SEQ ID NO: 27310 - protein, 11 aa, Homo sapiens
  AACR GENIE Results; TP53_p.A86Cfs*63; A0201
VLPTGQDLPCA

SEQ ID NO: 27311 - protein, 9 aa, Homo sapiens
  AACR GENIE Results; TP53_p.A86Cfs*63; B1302
GQLRFPSGL

SEQ ID NO: 27312 - protein, 9 aa, Homo sapiens
  AACR GENIE Results; TP53_p.A86Cfs*63; B3501
FPENLPGQL

SEQ ID NO: 27313 - protein, 9 aa, Homo sapiens
  AACR GENIE Results; TP53_p.A86Cfs*63; C0401
FPENLPGQL

SEQ ID NO: 27314 - protein, 9 aa, Homo sapiens
  AACR GENIE Results; TP53_p.A86Cfs*63; A2402
RFPSGLLAF

SEQ ID NO: 27315 - protein, 10 aa, Homo sapiens
  AACR GENIE Results; TP53_p.A86Cfs*63; C0602
LRFPSGLLAF

SEQ ID NO: 27316 - protein, 9 aa, Homo sapiens
  AACR GENIE Results; TP53_p.A86Cfs*63; C0102
RFPSGLLAF

SEQ ID NO: 27317 - protein, 9 aa, Homo sapiens
  AACR GENIE Results; TP53_p.A86Cfs*63; B3501
LPTGQDLPC

SEQ ID NO: 27318 - protein, 9 aa, Homo sapiens
  AACR GENIE Results; TP53_p.A86Cfs*63; B1302
GQDLPCAAV

SEQ ID NO: 27319 - protein, 10 aa, Homo sapiens
  AACR GENIE Results; TP53_p.A86Cfs*63; A2301
RFPSGLLAFW

SEQ ID NO: 27320 - protein, 10 aa, Homo sapiens
  AACR GENIE Results; TP53_p.A86Cfs*63; A2402
RFPSGLLAFW

SEQ ID NO: 27321 - protein, 9 aa, Homo sapiens
  AACR GENIE Results; TP53_p.A86Cfs*63; B5101
TSPLLAPVI

SEQ ID NO: 27322 - protein, 9 aa, Homo sapiens
  AACR GENIE Results; TP53_p.A86Cfs*63; C0802
FWDSQVCDL

SEQ ID NO: 27323 - protein, 9 aa, Homo sapiens
  AACR GENIE Results; TP53_p.A86Cfs*63; C0802
FPENLPGQL

SEQ ID NO: 27324 - protein, 9 aa, Homo sapiens
  AACR GENIE Results; TP53_p.A86Cfs*63; B5101
LPCPQQDVL

SEQ ID NO: 27325 - protein, 9 aa, Homo sapiens
  AACR GENIE Results; TP53_p.A86Cfs*63; B0702
LPCPQQDVL

SEQ ID NO: 27326 - protein, 10 aa, Homo sapiens
  AACR GENIE Results; TP53_p.A86Cfs*63; C0702
LRFPSGLLAF

SEQ ID NO: 27327 - protein, 10 aa, Homo sapiens
  AACR GENIE Results; TP53_p.A86Cfs*63; C0701
LRFPSGLLAF

SEQ ID NO: 27328 - protein, 11 aa, Homo sapiens
  AACR GENIE Results; TP53_p.C135F; A2402
TYSPALNKMFF

SEQ ID NO: 27329 - protein, 11 aa, Homo sapiens
  AACR GENIE Results; TP53_p.C135F; A2301
TYSPALNKMFF

SEQ ID NO: 27330 - protein, 9 aa, Homo sapiens
  AACR GENIE Results; TP53_p.C135F; B0702
SPALNKMFF

SEQ ID NO: 27331 - protein, 9 aa, Homo sapiens
  AACR GENIE Results; TP53_p.C135F; A0201
FQLAKTCPV

SEQ ID NO: 27332 - protein, 9 aa, Homo sapiens
  AACR GENIE Results; TP53_p.C135F; B1302
FQLAKTCPV

SEQ ID NO: 27333 - protein, 9 aa, Homo sapiens
  AACR GENIE Results; TP53_p.C135F; A0201
ALNKMFFQL

SEQ ID NO: 27334 - protein, 9 aa, Homo sapiens
  AACR GENIE Results; TP53_p.C135Y; B3501
SPALNKMFY

SEQ ID NO: 27335 - protein, 11 aa, Homo sapiens
  AACR GENIE Results; TP53_p.C135Y; A2402
TYSPALNKMFY

SEQ ID NO: 27336 - protein, 9 aa, Homo sapiens
  AACR GENIE Results; TP53_p.C135Y; A0201
YQLAKTCPV

SEQ ID NO: 27337 - protein, 11 aa, Homo sapiens
  AACR GENIE Results; TP53_p.C135Y; A2902
TYSPALNKMFY

SEQ ID NO: 27338 - protein, 9 aa, Homo sapiens
  AACR GENIE Results; TP53_p.C135Y; B1302
YQLAKTCPV

SEQ ID NO: 27339 - protein, 9 aa, Homo sapiens
  AACR GENIE Results; TP53_p.C135Y; A0201
ALNKMFYQL

SEQ ID NO: 27340 - protein, 8 aa, Homo sapiens
  AACR GENIE Results; TP53_p.C141W; B5701
KTWPVQLW

SEQ ID NO: 27341 - protein, 10 aa, Homo sapiens
  AACR GENIE Results; TP53_p.C141W; B5701
LAKTWPVQLW

SEQ ID NO: 27342 - protein, 9 aa, Homo sapiens
  AACR GENIE Results; TP53_p.C141W; C0202
LAKTWPVQL

SEQ ID NO: 27343 - protein, 9 aa, Homo sapiens
  AACR GENIE Results; TP53_p.C141W; C1203
LAKTWPVQL

SEQ ID NO: 27344 - protein, 9 aa, Homo sapiens
  AACR GENIE Results; TP53_p.C141Y; C1502
KTYPVQLWV

SEQ ID NO: 27345 - protein, 8 aa, Homo sapiens
  AACR GENIE Results; TP53_p.C141Y; B5701
KTYPVQLW

SEQ ID NO: 27346 - protein, 10 aa, Homo sapiens
  AACR GENIE Results; TP53_p.C141Y; B5701
LAKTYPVQLW

SEQ ID NO: 27347 - protein, 8 aa, Homo sapiens
  AACR GENIE Results; TP53_p.C141Y; B5801
KTYPVQLW

SEQ ID NO: 27348 - protein, 9 aa, Homo sapiens
  AACR GENIE Results; TP53_p.C141Y; A6802
KTYPVQLWV

SEQ ID NO: 27349 - protein, 8 aa, Homo sapiens
  AACR GENIE Results; TP53_p.C141Y; B1501
FCQLAKTY

SEQ ID NO: 27350 - protein, 9 aa, Homo sapiens
  AACR GENIE Results; TP53_p.C141Y; C1701
LAKTYPVQL

SEQ ID NO: 27351 - protein, 9 aa, Homo sapiens
  AACR GENIE Results; TP53_p.C141Y; B0801
LAKTYPVQL

SEQ ID NO: 27352 - protein, 9 aa, Homo sapiens
  AACR GENIE Results; TP53_p.C141Y; C0202
LAKTYPVQL

SEQ ID NO: 27353 - protein, 9 aa, Homo sapiens
  AACR GENIE Results; TP53_p.C141Y; C1203
LAKTYPVQL

SEQ ID NO: 27354 - protein, 9 aa, Homo sapiens
  AACR GENIE Results; TP53_p.C141Y; C1601
LAKTYPVQL

SEQ ID NO: 27355 - protein, 9 aa, Homo sapiens
  AACR GENIE Results; TP53_p.C141Y; C1203
KTYPVQLWV

SEQ ID NO: 27356 - protein, 9 aa, Homo sapiens
  AACR GENIE Results; TP53_p.C141Y; B1302
CQLAKTYPV

SEQ ID NO: 27357 - protein, 9 aa, Homo sapiens
  AACR GENIE Results; TP53_p.C176F; B5701
HMTEVVRRF

SEQ ID NO: 27358 - protein, 8 aa, Homo sapiens
  AACR GENIE Results; TP53_p.C176F; B5701
MTEVVRRF

SEQ ID NO: 27359 - protein, 9 aa, Homo sapiens
  AACR GENIE Results; TP53_p.C176F; A0301
HMTEVVRRF

SEQ ID NO: 27360 - protein, 11 aa, Homo sapiens
  AACR GENIE Results; TP53_p.C176S; A3303
EVVRRSPHHER

SEQ ID NO: 27361 - protein, 9 aa, Homo sapiens
  AACR GENIE Results; TP53_p.C176Y; A2902
HMTEVVRRY

SEQ ID NO: 27362 - protein, 9 aa, Homo sapiens
  AACR GENIE Results; TP53_p.C176Y; C1601
HMTEVVRRY

SEQ ID NO: 27363 - protein, 9 aa, Homo sapiens
  AACR GENIE Results; TP53_p.C176Y; B3501
HMTEVVRRY

SEQ ID NO: 27364 - protein, 9 aa, Homo sapiens
  AACR GENIE Results; TP53_p.C176Y; B4403
HMTEVVRRY

SEQ ID NO: 27365 - protein, 9 aa, Homo sapiens
  AACR GENIE Results; TP53_p.C176Y; B5701
HMTEVVRRY

SEQ ID NO: 27366 - protein, 9 aa, Homo sapiens
  AACR GENIE Results; TP53_p.C238F; C1402
NYMFNSSCM

SEQ ID NO: 27367 - protein, 9 aa, Homo sapiens
  AACR GENIE Results; TP53_p.C238F; B5701
TTIHYNYMF

SEQ ID NO: 27368 - protein, 9 aa, Homo sapiens
  AACR GENIE Results; TP53_p.C238F; A2402
NYMFNSSCM

SEQ ID NO: 27369 - protein, 8 aa, Homo sapiens
  AACR GENIE Results; TP53_p.C238F; B1501
YMFNSSCM

SEQ ID NO: 27370 - protein, 8 aa, Homo sapiens
  AACR GENIE Results; TP53_p.C238F; C1402
YMFNSSCM

SEQ ID NO: 27371 - protein, 9 aa, Homo sapiens
  AACR GENIE Results; TP53_p.C238R; A6801
TTIHYNYMR

SEQ ID NO: 27372 - protein, 9 aa, Homo sapiens
  AACR GENIE Results; TP53_p.C238R; B0801
YNYMRNSSC

SEQ ID NO: 27373 - protein, 9 aa, Homo sapiens
  AACR GENIE Results; TP53_p.C238S; A2402
NYMSNSSCM

SEQ ID NO: 27374 - protein, 8 aa, Homo sapiens
  AACR GENIE Results; TP53_p.C238S; B1501
YMSNSSCM

SEQ ID NO: 27375 - protein, 9 aa, Homo sapiens
  AACR GENIE Results; TP53_p.C238W; B5701
TTIHYNYMW

SEQ ID NO: 27376 - protein, 8 aa, Homo sapiens
  AACR GENIE Results; TP53_p.C238Y; B1502
YMYNSSCM

SEQ ID NO: 27377 - protein, 9 aa, Homo sapiens
  AACR GENIE Results; TP53_p.C238Y; A2902
TTIHYNYMY

SEQ ID NO: 27378 - protein, 9 aa, Homo sapiens
  AACR GENIE Results; TP53_p.C238Y; C1402
NYMYNSSCM

SEQ ID NO: 27379 - protein, 9 aa, Homo sapiens
  AACR GENIE Results; TP53_p.C238Y; A2901
TTIHYNYMY

SEQ ID NO: 27380 - protein, 8 aa, Homo sapiens
  AACR GENIE Results; TP53_p.C238Y; C0801
YMYNSSCM

SEQ ID NO: 27381 - protein, 9 aa, Homo sapiens
  AACR GENIE Results; TP53_p.C238Y; B5701
TTIHYNYMY

SEQ ID NO: 27382 - protein, 8 aa, Homo sapiens
  AACR GENIE Results; TP53_p.C238Y; B1501
YMYNSSCM

SEQ ID NO: 27383 - protein, 9 aa, Homo sapiens
  AACR GENIE Results; TP53_p.C242Afs*5; B3906
MCNSSAWAA

SEQ ID NO: 27384 - protein, 9 aa, Homo sapiens
  AACR GENIE Results; TP53_p.C242F; A6801
SSFMGGMNR

SEQ ID NO: 27385 - protein, 9 aa, Homo sapiens
  AACR GENIE Results; TP53_p.C242F; A3101
SSFMGGMNR

SEQ ID NO: 27386 - protein, 9 aa, Homo sapiens
  AACR GENIE Results; TP53_p.C242F; A3303
SSFMGGMNR

SEQ ID NO: 27387 - protein, 10 aa, Homo sapiens
  AACR GENIE Results; TP53_p.C242F; A6801
NSSFMGGMNR

SEQ ID NO: 27388 - protein, 9 aa, Homo sapiens
  AACR GENIE Results; TP53_p.C242F; A1101
SSFMGGMNR

SEQ ID NO: 27389 - protein, 8 aa, Homo sapiens
  AACR GENIE Results; TP53_p.C242F; A3303
SFMGGMNR

SEQ ID NO: 27390 - protein, 8 aa, Homo sapiens
  AACR GENIE Results; TP53_p.C242F; C1402
NYMCNSSF

SEQ ID NO: 27391 - protein, 9 aa, Homo sapiens
  AACR GENIE Results; TP53_p.C242F; A3301
SSFMGGMNR

SEQ ID NO: 27392 - protein, 8 aa, Homo sapiens
  AACR GENIE Results; TP53_p.C242F; A3101
SFMGGMNR

SEQ ID NO: 27393 - protein, 10 aa, Homo sapiens
  AACR GENIE Results; TP53_p.C242F; A3303
NSSFMGGMNR

SEQ ID NO: 27394 - protein, 8 aa, Homo sapiens
  AACR GENIE Results; TP53_p.C242F; A1101
SFMGGMNR

SEQ ID NO: 27395 - protein, 9 aa, Homo sapiens
  AACR GENIE Results; TP53_p.C242F; A3101
SFMGGMNRR

SEQ ID NO: 27396 - protein, 9 aa, Homo sapiens
  AACR GENIE Results; TP53_p.C242F; A3303
SFMGGMNRR

SEQ ID NO: 27397 - protein, 8 aa, Homo sapiens
  AACR GENIE Results; TP53_p.C242F; A3301
SFMGGMNR

SEQ ID NO: 27398 - protein, 10 aa, Homo sapiens
  AACR GENIE Results; TP53_p.C242F; A6801
SSFMGGMNRR

SEQ ID NO: 27399 - protein, 9 aa, Homo sapiens
  AACR GENIE Results; TP53_p.C242F; A0301
SSFMGGMNR

SEQ ID NO: 27400 - protein, 9 aa, Homo sapiens
  AACR GENIE Results; TP53_p.C242W; A3101
SSWMGGMNR

SEQ ID NO: 27401 - protein, 9 aa, Homo sapiens
  AACR GENIE Results; TP53_p.C242W; A6801
SSWMGGMNR

SEQ ID NO: 27402 - protein, 9 aa, Homo sapiens
  AACR GENIE Results; TP53_p.C242Y; A1101
SSYMGGMNR

SEQ ID NO: 27403 - protein, 9 aa, Homo sapiens
  AACR GENIE Results; TP53_p.C242Y; A3101
SSYMGGMNR

SEQ ID NO: 27404 - protein, 9 aa, Homo sapiens
  AACR GENIE Results; TP53_p.C242Y; A6801
SSYMGGMNR

SEQ ID NO: 27405 - protein, 10 aa, Homo sapiens
  AACR GENIE Results; TP53_p.C242Y; A6801
NSSYMGGMNR

SEQ ID NO: 27406 - protein, 9 aa, Homo sapiens
  AACR GENIE Results; TP53_p.C242Y; A0301
SSYMGGMNR

SEQ ID NO: 27407 - protein, 8 aa, Homo sapiens
  AACR GENIE Results; TP53_p.C242Y; A3101
SYMGGMNR

SEQ ID NO: 27408 - protein, 9 aa, Homo sapiens
  AACR GENIE Results; TP53_p.C242Y; A3101
SYMGGMNRR

SEQ ID NO: 27409 - protein, 8 aa, Homo sapiens
  AACR GENIE Results; TP53_p.C242Y; A1101
SYMGGMNR

SEQ ID NO: 27410 - protein, 10 aa, Homo sapiens
  AACR GENIE Results; TP53_p.C242Y; A1101
SSYMGGMNRR

SEQ ID NO: 27411 - protein, 10 aa, Homo sapiens
  AACR GENIE Results; TP53_p.C242Y; A6801
SSYMGGMNRR

SEQ ID NO: 27412 - protein, 10 aa, Homo sapiens
  AACR GENIE Results; TP53_p.C242Y; A3101
SSYMGGMNRR

SEQ ID NO: 27413 - protein, 9 aa, Homo sapiens
  AACR GENIE Results; TP53_p.C242Y; B2705
SSYMGGMNR

SEQ ID NO: 27414 - protein, 10 aa, Homo sapiens
  AACR GENIE Results; TP53_p.C275F; B2705
GRNSFEVRVF

SEQ ID NO: 27415 - protein, 9 aa, Homo sapiens
  AACR GENIE Results; TP53_p.C275F; C0701
RNSFEVRVF

SEQ ID NO: 27416 - protein, 8 aa, Homo sapiens
  AACR GENIE Results; TP53_p.C275F; C1203
NSFEVRVF

SEQ ID NO: 27417 - protein, 8 aa, Homo sapiens
  AACR GENIE Results; TP53_p.C275F; B1501
NSFEVRVF

SEQ ID NO: 27418 - protein, 8 aa, Homo sapiens
  AACR GENIE Results; TP53_p.C275F; B5701
NSFEVRVF

SEQ ID NO: 27419 - protein, 8 aa, Homo sapiens
  AACR GENIE Results; TP53_p.C275F; C1601
NSFEVRVF

SEQ ID NO: 27420 - protein, 9 aa, Homo sapiens
  AACR GENIE Results; TP53_p.C275F; B5701
RNSFEVRVF

SEQ ID NO: 27421 - protein, 8 aa, Homo sapiens
  AACR GENIE Results; TP53_p.C275F; B1801
NSFEVRVF

SEQ ID NO: 27422 - protein, 10 aa, Homo sapiens
  AACR GENIE Results; TP53_p.C275F; C0701
GRNSFEVRVF

SEQ ID NO: 27423 - protein, 9 aa, Homo sapiens
  AACR GENIE Results; TP53_p.C275F; C1601
RNSFEVRVF

SEQ ID NO: 27424 - protein, 10 aa, Homo sapiens
  AACR GENIE Results; TP53_p.C275F; C0602
GRNSFEVRVF

SEQ ID NO: 27425 - protein, 9 aa, Homo sapiens
  AACR GENIE Results; TP53_p.C275Lfs*31; B0702
SPRAAPREH

SEQ ID NO: 27426 - protein, 9 aa, Homo sapiens
  AACR GENIE Results; TP53_p.C275Lfs*31; B0702
SPQERGASP

SEQ ID NO: 27427 - protein, 9 aa, Homo sapiens
  AACR GENIE Results; TP53_p.C275Lfs*31; A3101
RGRESPQER

SEQ ID NO: 27428 - protein, 9 aa, Homo sapiens
  AACR GENIE Results; TP53_p.C275Lfs*31; A3101
LSWERPAHR

SEQ ID NO: 27429 - protein, 11 aa, Homo sapiens
  AACR GENIE Results; TP53_p.C275Lfs*31; A6801
ESPQERGASPR

SEQ ID NO: 27430 - protein, 8 aa, Homo sapiens
  AACR GENIE Results; TP53_p.C275W; B5701
NSFEVRVW

SEQ ID NO: 27431 - protein, 9 aa, Homo sapiens
  AACR GENIE Results; TP53_p.C275W; B5701
RNSFEVRVW

SEQ ID NO: 27432 - protein, 8 aa, Homo sapiens
  AACR GENIE Results; TP53_p.C275W; C1203
NSFEVRVW

SEQ ID NO: 27433 - protein, 8 aa, Homo sapiens
  AACR GENIE Results; TP53_p.C275Y; B1501
NSFEVRVY

SEQ ID NO: 27434 - protein, 8 aa, Homo sapiens
  AACR GENIE Results; TP53_p.C275Y; C1203
NSFEVRVY

SEQ ID NO: 27435 - protein, 8 aa, Homo sapiens
  AACR GENIE Results; TP53_p.C275Y; B1801
NSFEVRVY

SEQ ID NO: 27436 - protein, 10 aa, Homo sapiens
  AACR GENIE Results; TP53_p.C275Y; B2705
GRNSFEVRVY

SEQ ID NO: 27437 - protein, 9 aa, Homo sapiens
  AACR GENIE Results; TP53_p.C275Y; C1601
RNSFEVRVY

SEQ ID NO: 27438 - protein, 8 aa, Homo sapiens
  AACR GENIE Results; TP53_p.C275Y; C1601
NSFEVRVY

SEQ ID NO: 27439 - protein, 9 aa, Homo sapiens
  AACR GENIE Results; TP53_p.C275Y; A6802
NSFEVRVYA

SEQ ID NO: 27440 - protein, 10 aa, Homo sapiens
  AACR GENIE Results; TP53_p.C275Y; B2702
GRNSFEVRVY

SEQ ID NO: 27441 - protein, 9 aa, Homo sapiens
  AACR GENIE Results; TP53_p.C275Y; C0701
RNSFEVRVY

SEQ ID NO: 27442 - protein, 8 aa, Homo sapiens
  AACR GENIE Results; TP53_p.C275Y; B3501
NSFEVRVY

SEQ ID NO: 27443 - protein, 8 aa, Homo sapiens
  AACR GENIE Results; TP53_p.C275Y; B5701
NSFEVRVY

SEQ ID NO: 27444 - protein, 8 aa, Homo sapiens
  AACR GENIE Results; TP53_p.C275Y; B5801
NSFEVRVY

SEQ ID NO: 27445 - protein, 9 aa, Homo sapiens
  AACR GENIE Results; TP53_p.C275Y; B5701
RNSFEVRVY

SEQ ID NO: 27446 - protein, 10 aa, Homo sapiens
  AACR GENIE Results; TP53_p.C275Y; C0701
GRNSFEVRVY

SEQ ID NO: 27447 - protein, 8 aa, Homo sapiens
  AACR GENIE Results; TP53_p.C275Y; B0801
NSFEVRVY

SEQ ID NO: 27448 - protein, 8 aa, Homo sapiens
  AACR GENIE Results; TP53_p.C277F; B1801
FEVRVCAF

SEQ ID NO: 27449 - protein, 9 aa, Homo sapiens
  AACR GENIE Results; TP53_p.C277F; C1402
SFEVRVCAF

SEQ ID NO: 27450 - protein, 9 aa, Homo sapiens
  AACR GENIE Results; TP53_p.D208V; A2402
EYLDVRNTF

SEQ ID NO: 27451 - protein, 10 aa, Homo sapiens
  AACR GENIE Results; TP53_p.D208V; B4403
VEYLDVRNTF

SEQ ID NO: 27452 - protein, 10 aa, Homo sapiens
  AACR GENIE Results; TP53_p.D208V; B1801
VEYLDVRNTF

SEQ ID NO: 27453 - protein, 8 aa, Homo sapiens
  AACR GENIE Results; TP53_p.D208V; C0501
YLDVRNTF

SEQ ID NO: 27454 - protein, 10 aa, Homo sapiens
  AACR GENIE Results; TP53_p.D208V; B4402
VEYLDVRNTF

SEQ ID NO: 27455 - protein, 8 aa, Homo sapiens
  AACR GENIE Results; TP53_p.D208V; C0401
YLDVRNTF

SEQ ID NO: 27456 - protein, 10 aa, Homo sapiens
  AACR GENIE Results; TP53_p.D208V; B4001
VEYLDVRNTF

SEQ ID NO: 27457 - protein, 8 aa, Homo sapiens
  AACR GENIE Results; TP53_p.D208V; B0801
YLDVRNTF

SEQ ID NO: 27458 - protein, 10 aa, Homo sapiens
  AACR GENIE Results; TP53_p.D208V; B0702
VEYLDVRNTF

SEQ ID NO: 27459 - protein, 10 aa, Homo sapiens
  AACR GENIE Results; TP53_p.D208V; B1501
VEYLDVRNTF

SEQ ID NO: 27460 - protein, 8 aa, Homo sapiens
  AACR GENIE Results; TP53_p.D208V; A0101
YLDVRNTF

SEQ ID NO: 27461 - protein, 9 aa, Homo sapiens
  AACR GENIE Results; TP53_p.D259Y; A2902
ILTIITLEY

SEQ ID NO: 27462 - protein, 10 aa, Homo sapiens
  AACR GENIE Results; TP53_p.D259Y; A6801
EYSSGNLLGR

SEQ ID NO: 27463 - protein, 9 aa, Homo sapiens
  AACR GENIE Results; TP53_p.D259Y; A6801
YSSGNLLGR

SEQ ID NO: 27464 - protein, 9 aa, Homo sapiens
  AACR GENIE Results; TP53_p.D259Y; B1501
ILTIITLEY

SEQ ID NO: 27465 - protein, 9 aa, Homo sapiens
  AACR GENIE Results; TP53_p.D259Y; B4001
LEYSSGNLL

SEQ ID NO: 27466 - protein, 8 aa, Homo sapiens
  AACR GENIE Results; TP53_p.D259Y; A0101
LTIITLEY

SEQ ID NO: 27467 - protein, 9 aa, Homo sapiens
  AACR GENIE Results; TP53_p.D259Y; A0301
ILTIITLEY

SEQ ID NO: 27468 - protein, 9 aa, Homo sapiens
  AACR GENIE Results; TP53_p.D259Y; A3101
YSSGNLLGR

SEQ ID NO: 27469 - protein, 9 aa, Homo sapiens
  AACR GENIE Results; TP53_p.D259Y; B3501
ILTIITLEY

SEQ ID NO: 27470 - protein, 10 aa, Homo sapiens
  AACR GENIE Results; TP53_p.D259Y; A3101
EYSSGNLLGR

SEQ ID NO: 27471 - protein, 10 aa, Homo sapiens
  AACR GENIE Results; TP53_p.D259Y; B3801
TLEYSSGNLL

SEQ ID NO: 27472 - protein, 9 aa, Homo sapiens
  AACR GENIE Results; TP53_p.D259Y; A0101
ILTIITLEY

SEQ ID NO: 27473 - protein, 9 aa, Homo sapiens
  AACR GENIE Results; TP53_p.D259Y; A1101
YSSGNLLGR

SEQ ID NO: 27474 - protein, 8 aa, Homo sapiens
  AACR GENIE Results; TP53_p.D259Y; B1501
LTIITLEY

SEQ ID NO: 27475 - protein, 9 aa, Homo sapiens
  AACR GENIE Results; TP53_p.D259Y; A2301
ILTIITLEY

SEQ ID NO: 27476 - protein, 10 aa, Homo sapiens
  AACR GENIE Results; TP53_p.D259Y; A2902
PILTIITLEY

SEQ ID NO: 27477 - protein, 11 aa, Homo sapiens
  AACR GENIE Results; TP53_p.D259Y; B3501
RPILTIITLEY

SEQ ID NO: 27478 - protein, 9 aa, Homo sapiens
  AACR GENIE Results; TP53_p.D259Y; B3801
LEYSSGNLL

SEQ ID NO: 27479 - protein, 9 aa, Homo sapiens
  AACR GENIE Results; TP53_p.D259Y; B5101
LEYSSGNLL

SEQ ID NO: 27480 - protein, 8 aa, Homo sapiens
  AACR GENIE Results; TP53_p.E224D; B5101
VPYEPPDV

SEQ ID NO: 27481 - protein, 8 aa, Homo sapiens
  AACR GENIE Results; TP53_p.E224D; B5501
VPYEPPDV

SEQ ID NO: 27482 - protein, 8 aa, Homo sapiens
  AACR GENIE Results; TP53_p.E224D; B5502
VPYEPPDV

SEQ ID NO: 27483 - protein, 10 aa, Homo sapiens
  AACR GENIE Results; TP53_p.E224D; A0206
VVVPYEPPDV

SEQ ID NO: 27484 - protein, 9 aa, Homo sapiens
  AACR GENIE Results; TP53_p.E224D; B5502
VPYEPPDVG

SEQ ID NO: 27485 - protein, 10 aa, Homo sapiens
  AACR GENIE Results; TP53_p.E224D; A6802
VVVPYEPPDV

SEQ ID NO: 27486 - protein, 9 aa, Homo sapiens
  AACR GENIE Results; TP53_p.E224D; A0207
VVPYEPPDV

SEQ ID NO: 27487 - protein, 9 aa, Homo sapiens
  AACR GENIE Results; TP53_p.E224D; B5101
VPYEPPDVG

SEQ ID NO: 27488 - protein, 8 aa, Homo sapiens
  AACR GENIE Results; TP53_p.E224D; B3906
VPYEPPDV

SEQ ID NO: 27489 - protein, 10 aa, Homo sapiens
  AACR GENIE Results; TP53_p.E224D; B5502
VPYEPPDVGS

SEQ ID NO: 27490 - protein, 9 aa, Homo sapiens
  AACR GENIE Results; TP53_p.E224D; A0206
VVPYEPPDV

SEQ ID NO: 27491 - protein, 10 aa, Homo sapiens
  AACR GENIE Results; TP53_p.E224D; A0201
VVVPYEPPDV

SEQ ID NO: 27492 - protein, 10 aa, Homo sapiens
  AACR GENIE Results; TP53_p.E224D; A0203
VVVPYEPPDV

SEQ ID NO: 27493 - protein, 9 aa, Homo sapiens
  AACR GENIE Results; TP53_p.E258D; C0802
TLDDSSGNL

SEQ ID NO: 27494 - protein, 10 aa, Homo sapiens
  AACR GENIE Results; TP53_p.E258D; C0802
TLDDSSGNLL

SEQ ID NO: 27495 - protein, 10 aa, Homo sapiens
  AACR GENIE Results; TP53_p.E258D; A6801
DDSSGNLLGR

SEQ ID NO: 27496 - protein, 10 aa, Homo sapiens
  AACR GENIE Results; TP53_p.E258D; B3801
TLDDSSGNLL

SEQ ID NO: 27497 - protein, 10 aa, Homo sapiens
  AACR GENIE Results; TP53_p.E258D; A3301
DDSSGNLLGR

SEQ ID NO: 27498 - protein, 10 aa, Homo sapiens
  AACR GENIE Results; TP53_p.E258D; B3901
TLDDSSGNLL

SEQ ID NO: 27499 - protein, 10 aa, Homo sapiens
  AACR GENIE Results; TP53_p.E258D; C0501
TLDDSSGNLL

SEQ ID NO: 27500 - protein, 9 aa, Homo sapiens
  AACR GENIE Results; TP53_p.E258D; C0501
TLDDSSGNL

SEQ ID NO: 27501 - protein, 8 aa, Homo sapiens
  AACR GENIE Results; TP53_p.E258D; B3901
DDSSGNLL

SEQ ID NO: 27502 - protein, 10 aa, Homo sapiens
  AACR GENIE Results; TP53_p.E258D; A0201
TLDDSSGNLL

SEQ ID NO: 27503 - protein, 10 aa, Homo sapiens
  AACR GENIE Results; TP53_p.E258D; B1501
TLDDSSGNLL

SEQ ID NO: 27504 - protein, 10 aa, Homo sapiens
  AACR GENIE Results; TP53_p.E258D; A3303
DDSSGNLLGR

SEQ ID NO: 27505 - protein, 9 aa, Homo sapiens
  AACR GENIE Results; TP53_p.E258D; B3801
LDDSSGNLL

SEQ ID NO: 27506 - protein, 11 aa, Homo sapiens
  AACR GENIE Results; TP53_p.E258D; B5801
ITLDDSSGNLL

SEQ ID NO: 27507 - protein, 11 aa, Homo sapiens
  AACR GENIE Results; TP53_p.E258D; A0205
ITLDDSSGNLL

SEQ ID NO: 27508 - protein, 11 aa, Homo sapiens
  AACR GENIE Results; TP53_p.E258D; B2702
LDDSSGNLLGR

SEQ ID NO: 27509 - protein, 9 aa, Homo sapiens
  AACR GENIE Results; TP53_p.E258D; B3801
TLDDSSGNL

SEQ ID NO: 27510 - protein, 11 aa, Homo sapiens
  AACR GENIE Results; TP53_p.E258D; B5001
ITLDDSSGNLL

SEQ ID NO: 27511 - protein, 9 aa, Homo sapiens
  AACR GENIE Results; TP53_p.E258D; B3901
TLDDSSGNL

SEQ ID NO: 27512 - protein, 10 aa, Homo sapiens
  AACR GENIE Results; TP53_p.E258D; A0205
TLDDSSGNLL

SEQ ID NO: 27513 - protein, 10 aa, Homo sapiens
  AACR GENIE Results; TP53_p.E258D; B4001
TLDDSSGNLL

SEQ ID NO: 27514 - protein, 10 aa, Homo sapiens
  AACR GENIE Results; TP53_p.E258D; B2702
DDSSGNLLGR

SEQ ID NO: 27515 - protein, 11 aa, Homo sapiens
  AACR GENIE Results; TP53_p.E258D; B3801
ITLDDSSGNLL

SEQ ID NO: 27516 - protein, 9 aa, Homo sapiens
  AACR GENIE Results; TP53_p.E258D; A0201
TLDDSSGNL

SEQ ID NO: 27517 - protein, 9 aa, Homo sapiens
  AACR GENIE Results; TP53_p.E258D; C0802
LDDSSGNLL

SEQ ID NO: 27518 - protein, 8 aa, Homo sapiens
  AACR GENIE Results; TP53_p.E258K; B3701
KDSSGNLL

SEQ ID NO: 27519 - protein, 10 aa, Homo sapiens
  AACR GENIE Results; TP53_p.E258K; A3001
TLKDSSGNLL

SEQ ID NO: 27520 - protein, 10 aa, Homo sapiens
  AACR GENIE Results; TP53_p.E258K; B1501
TLKDSSGNLL

SEQ ID NO: 27521 - protein, 9 aa, Homo sapiens
  AACR GENIE Results; TP53_p.E258K; B0801
TLKDSSGNL

SEQ ID NO: 27522 - protein, 9 aa, Homo sapiens
  AACR GENIE Results; TP53_p.E258K; B1501
TLKDSSGNL

SEQ ID NO: 27523 - protein, 10 aa, Homo sapiens
  AACR GENIE Results; TP53_p.E258K; B5001
TLKDSSGNLL

SEQ ID NO: 27524 - protein, 8 aa, Homo sapiens
  AACR GENIE Results; TP53_p.E258K; B4002
KDSSGNLL

SEQ ID NO: 27525 - protein, 11 aa, Homo sapiens
  AACR GENIE Results; TP53_p.E258K; B5801
ITLKDSSGNLL

SEQ ID NO: 27526 - protein, 9 aa, Homo sapiens
  AACR GENIE Results; TP53_p.E271K; B2705
GRNSFKVRV

SEQ ID NO: 27527 - protein, 9 aa, Homo sapiens
  AACR GENIE Results; TP53_p.E271K; C0602
GRNSFKVRV

SEQ ID NO: 27528 - protein, 9 aa, Homo sapiens
  AACR GENIE Results; TP53_p.E271Q; C0602
GRNSFQVRV

SEQ ID NO: 27529 - protein, 9 aa, Homo sapiens
  AACR GENIE Results; TP53_p.E271V; B2705
GRNSFVVRV

SEQ ID NO: 27530 - protein, 9 aa, Homo sapiens
  AACR GENIE Results; TP53_p.E271V; C0602
GRNSFVVRV

SEQ ID NO: 27531 - protein, 11 aa, Homo sapiens
  AACR GENIE Results; TP53_p.E271V; A3301
NLLGRNSFVVR

SEQ ID NO: 27532 - protein, 8 aa, Homo sapiens
  AACR GENIE Results; TP53_p.E271V; B2705
GRNSFVVR

SEQ ID NO: 27533 - protein, 9 aa, Homo sapiens
  AACR GENIE Results; TP53_p.E271V; A3101
LGRNSFVVR

SEQ ID NO: 27534 - protein, 9 aa, Homo sapiens
  AACR GENIE Results; TP53_p.E271V; A3303
LGRNSFVVR

SEQ ID NO: 27535 - protein, 8 aa, Homo sapiens
  AACR GENIE Results; TP53_p.E271V; C1502
RNSFVVRV

SEQ ID NO: 27536 - protein, 11 aa, Homo sapiens
  AACR GENIE Results; TP53_p.E271V; A3101
NLLGRNSFVVR

SEQ ID NO: 27537 - protein, 10 aa, Homo sapiens
  AACR GENIE Results; TP53_p.E285K; A0301
RTKEENLRKK

SEQ ID NO: 27538 - protein, 9 aa, Homo sapiens
  AACR GENIE Results; TP53_p.E285K; A0301
RTKEENLRK

SEQ ID NO: 27539 - protein, 9 aa, Homo sapiens
  AACR GENIE Results; TP53_p.E285K; A1101
RTKEENLRK

SEQ ID NO: 27540 - protein, 9 aa, Homo sapiens
  AACR GENIE Results; TP53_p.E285V; A1101
RTVEENLRK

SEQ ID NO: 27541 - protein, 9 aa, Homo sapiens
  AACR GENIE Results; TP53_p.E285V; A0301
TVEENLRKK

SEQ ID NO: 27542 - protein, 10 aa, Homo sapiens
  AACR GENIE Results; TP53_p.E285V; A0301
RTVEENLRKK

SEQ ID NO: 27543 - protein, 9 aa, Homo sapiens
  AACR GENIE Results; TP53_p.E285V; A1101
TVEENLRKK

SEQ ID NO: 27544 - protein, 9 aa, Homo sapiens
  AACR GENIE Results; TP53_p.E285V; A0301
RTVEENLRK

SEQ ID NO: 27545 - protein, 10 aa, Homo sapiens
  AACR GENIE Results; TP53_p.E285V; A1101
RTVEENLRKK

SEQ ID NO: 27546 - protein, 10 aa, Homo sapiens
  AACR GENIE Results; TP53_p.E286K; A0301
RTEKENLRKK

SEQ ID NO: 27547 - protein, 9 aa, Homo sapiens
  AACR GENIE Results; TP53_p.E286K; B2705
RRTEKENLR

SEQ ID NO: 27548 - protein, 10 aa, Homo sapiens
  AACR GENIE Results; TP53_p.E286V; A0301
RTEVENLRKK

SEQ ID NO: 27549 - protein, 10 aa, Homo sapiens
  AACR GENIE Results; TP53_p.E286V; A1101
RTEVENLRKK

SEQ ID NO: 27550 - protein, 9 aa, Homo sapiens
  AACR GENIE Results; TP53_p.E286V; A1101
RTEVENLRK

SEQ ID NO: 27551 - protein, 9 aa, Homo sapiens
  AACR GENIE Results; TP53_p.E286V; A0301
RTEVENLRK

SEQ ID NO: 27552 - protein, 9 aa, Homo sapiens
  AACR GENIE Results; TP53_p.E294Sfs*51; A6801
TPAPLPSQR

SEQ ID NO: 27553 - protein, 10 aa, Homo sapiens
  AACR GENIE Results; TP53_p.E294Sfs*51; A6801
TTPAPLPSQR

SEQ ID NO: 27554 - protein, 10 aa, Homo sapiens
  AACR GENIE Results; TP53_p.E294Sfs*51; B0702
SPFRSVGVSA

SEQ ID NO: 27555 - protein, 9 aa, Homo sapiens
  AACR GENIE Results; TP53_p.E294Sfs*51; C0102
ISPFRSVGV

SEQ ID NO: 27556 - protein, 8 aa, Homo sapiens
  AACR GENIE Results; TP53_p.E294Sfs*51; B5101
SPFRSVGV

SEQ ID NO: 27557 - protein, 8 aa, Homo sapiens
  AACR GENIE Results; TP53_p.E294Sfs*51; B0702
SPFRSVGV

SEQ ID NO: 27558 - protein, 9 aa, Homo sapiens
  AACR GENIE Results; TP53_p.E294Sfs*51; A6801
RSVGVSASR

SEQ ID NO: 27559 - protein, 9 aa, Homo sapiens
  AACR GENIE Results; TP53_p.E294Sfs*51; B5701
RSVGVSASR

SEQ ID NO: 27560 - protein, 8 aa, Homo sapiens
  AACR GENIE Results; TP53_p.E294Sfs*51; B0801
SPFRSVGV

SEQ ID NO: 27561 - protein, 9 aa, Homo sapiens
  AACR GENIE Results; TP53_p.E294Sfs*51; A1101
RSVGVSASR

SEQ ID NO: 27562 - protein, 9 aa, Homo sapiens
  AACR GENIE Results; TP53_p.E294Sfs*51; A0301
RSVGVSASR

SEQ ID NO: 27563 - protein, 10 aa, Homo sapiens
  AACR GENIE Results; TP53_p.E294Sfs*51; A6801
TPAPLPSQRR

SEQ ID NO: 27564 - protein, 9 aa, Homo sapiens
  AACR GENIE Results; TP53_p.E56Kfs*67; C0303
SCILGQPSL

SEQ ID NO: 27565 - protein, 9 aa, Homo sapiens
  AACR GENIE Results; TP53_p.E56Kfs*67; C0304
SCILGQPSL

SEQ ID NO: 27566 - protein, 9 aa, Homo sapiens
  AACR GENIE Results; TP53_p.E56Kfs*67; B1501
SCILGQPSL

SEQ ID NO: 27567 - protein, 9 aa, Homo sapiens
  AACR GENIE Results; TP53_p.E56Kfs*67; B0702
LPRKPTRAA

SEQ ID NO: 27568 - protein, 9 aa, Homo sapiens
  AACR GENIE Results; TP53_p.E56Kfs*67; B0702
SCILGQPSL

SEQ ID NO: 27569 - protein, 8 aa, Homo sapiens
  AACR GENIE Results; TP53_p.E56Kfs*67; C1203
FTKTQVQM

SEQ ID NO: 27570 - protein, 8 aa, Homo sapiens
  AACR GENIE Results; TP53_p.E56Kfs*67; B0801
FTKTQVQM

SEQ ID NO: 27571 - protein, 10 aa, Homo sapiens
  AACR GENIE Results; TP53_p.E56Kfs*67; A1101
ASCILGQPSL

SEQ ID NO: 27572 - protein, 9 aa, Homo sapiens
  AACR GENIE Results; TP53_p.E56Kfs*67; A0201
SCILGQPSL

SEQ ID NO: 27573 - protein, 9 aa, Homo sapiens
  AACR GENIE Results; TP53_p.E56Kfs*67; C1601
SCILGQPSL

SEQ ID NO: 27574 - protein, 9 aa, Homo sapiens
  AACR GENIE Results; TP53_p.E56Kfs*67; B0801
SCILGQPSL

SEQ ID NO: 27575 - protein, 8 aa, Homo sapiens
  AACR GENIE Results; TP53_p.E56Kfs*67; C1601
FTKTQVQM

SEQ ID NO: 27576 - protein, 11 aa, Homo sapiens
  AACR GENIE Results; TP53_p.E56Kfs*67; B0702
LPRKPTRAATV

SEQ ID NO: 27577 - protein, 8 aa, Homo sapiens
  AACR GENIE Results; TP53_p.E56Kfs*67; B1501
FTKTQVQM

SEQ ID NO: 27578 - protein, 9 aa, Homo sapiens
  AACR GENIE Results; TP53_p.E56Kfs*67; B4001
SCILGQPSL

SEQ ID NO: 27579 - protein, 9 aa, Homo sapiens
  AACR GENIE Results; TP53_p.E56Kfs*67; B3501
SCILGQPSL

SEQ ID NO: 27580 - protein, 9 aa, Homo sapiens
  AACR GENIE Results; TP53_p.F113V; A1101
GVLHSGTAK

SEQ ID NO: 27581 - protein, 9 aa, Homo sapiens
  AACR GENIE Results; TP53_p.F113V; A0301
GVLHSGTAK

SEQ ID NO: 27582 - protein, 8 aa, Homo sapiens
  AACR GENIE Results; TP53_p.F113V; A0301
VLHSGTAK

SEQ ID NO: 27583 - protein, 9 aa, Homo sapiens
  AACR GENIE Results; TP53_p.F113V; C1502
GSYGFRLGV

SEQ ID NO: 27584 - protein, 9 aa, Homo sapiens
  AACR GENIE Results; TP53_p.F113V; B1302
GSYGFRLGV

SEQ ID NO: 27585 - protein, 9 aa, Homo sapiens
  AACR GENIE Results; TP53_p.F113V; C1402
SYGFRLGVL

SEQ ID NO: 27586 - protein, 8 aa, Homo sapiens
  AACR GENIE Results; TP53_p.F113V; A1101
VLHSGTAK

SEQ ID NO: 27587 - protein, 11 aa, Homo sapiens
  AACR GENIE Results; TP53_p.F113V; A0301
RLGVLHSGTAK

SEQ ID NO: 27588 - protein, 9 aa, Homo sapiens
  AACR GENIE Results; TP53_p.F134C; B0702
SPALNKMCC

SEQ ID NO: 27589 - protein, 8 aa, Homo sapiens
  AACR GENIE Results; TP53_p.F134L; B0702
SPALNKML

SEQ ID NO: 27590 - protein, 10 aa, Homo sapiens
  AACR GENIE Results; TP53_p.F134L; A2301
TYSPALNKML

SEQ ID NO: 27591 - protein, 10 aa, Homo sapiens
  AACR GENIE Results; TP53_p.F134L; A2402
TYSPALNKML

SEQ ID NO: 27592 - protein, 9 aa, Homo sapiens
  AACR GENIE Results; TP53_p.F134L; C0102
YSPALNKML

SEQ ID NO: 27593 - protein, 8 aa, Homo sapiens
  AACR GENIE Results; TP53_p.F134L; B0801
SPALNKML

SEQ ID NO: 27594 - protein, 11 aa, Homo sapiens
  AACR GENIE Results; TP53_p.F134L; B0702
SPALNKMLCQL

SEQ ID NO: 27595 - protein, 9 aa, Homo sapiens
  AACR GENIE Results; TP53_p.F134L; B0702
SPALNKMLC

SEQ ID NO: 27596 - protein, 9 aa, Homo sapiens
  AACR GENIE Results; TP53_p.F212Sfs*3; A0201
YLDDRNTST

SEQ ID NO: 27597 - protein, 9 aa, Homo sapiens
  AACR GENIE Results; TP53_p.F212Sfs*3; C0802
YLDDRNTST

SEQ ID NO: 27598 - protein, 9 aa, Homo sapiens
  AACR GENIE Results; TP53_p.F212Sfs*3; C0501
YLDDRNTST

SEQ ID NO: 27599 - protein, 9 aa, Homo sapiens
  AACR GENIE Results; TP53_p.F212Sfs*3; B0801
YLDDRNTST

SEQ ID NO: 27600 - protein, 9 aa, Homo sapiens
  AACR GENIE Results; TP53_p.F212Sfs*3; A0101
YLDDRNTST

SEQ ID NO: 27601 - protein, 9 aa, Homo sapiens
  AACR GENIE Results; TP53_p.F270L; B2705
GRNSLEVRV

SEQ ID NO: 27602 - protein, 9 aa, Homo sapiens
  AACR GENIE Results; TP53_p.F270L; C0602
GRNSLEVRV

SEQ ID NO: 27603 - protein, 8 aa, Homo sapiens
  AACR GENIE Results; TP53_p.F270L; B0801
NLLGRNSL

SEQ ID NO: 27604 - protein, 10 aa, Homo sapiens
  AACR GENIE Results; TP53_p.F270L; B0702
SGNLLGRNSL

SEQ ID NO: 27605 - protein, 9 aa, Homo sapiens
  AACR GENIE Results; TP53_p.F270V; C0602
GRNSVEVRV

SEQ ID NO: 27606 - protein, 11 aa, Homo sapiens
  AACR GENIE Results; TP53_p.F270V; A0201
GNLLGRNSVEV

SEQ ID NO: 27607 - protein, 8 aa, Homo sapiens
  AACR GENIE Results; TP53_p.F270V; C1203
NSVEVRVC

SEQ ID NO: 27608 - protein, 10 aa, Homo sapiens
  AACR GENIE Results; TP53_p.F328Sfs*17; B0702
SPFRSVGVSA

SEQ ID NO: 27609 - protein, 9 aa, Homo sapiens
  AACR GENIE Results; TP53_p.F328Sfs*17; C0102
YSPFRSVGV

SEQ ID NO: 27610 - protein, 9 aa, Homo sapiens
  AACR GENIE Results; TP53_p.F328Sfs*17; B4403
GEYSPFRSV

SEQ ID NO: 27611 - protein, 8 aa, Homo sapiens
  AACR GENIE Results; TP53_p.F328Sfs*17; B5101
SPFRSVGV

SEQ ID NO: 27612 - protein, 8 aa, Homo sapiens
  AACR GENIE Results; TP53_p.F328Sfs*17; B0702
SPFRSVGV

SEQ ID NO: 27613 - protein, 9 aa, Homo sapiens
  AACR GENIE Results; TP53_p.F328Sfs*17; B4001
GEYSPFRSV

SEQ ID NO: 27614 - protein, 8 aa, Homo sapiens
  AACR GENIE Results; TP53_p.F328Sfs*17; B0801
SPFRSVGV

SEQ ID NO: 27615 - protein, 9 aa, Homo sapiens
  AACR GENIE Results; TP53_p.F328Sfs*17; A1101
RSVGVSASR

SEQ ID NO: 27616 - protein, 9 aa, Homo sapiens
  AACR GENIE Results; TP53_p.F328Sfs*17; A0301
RSVGVSASR

SEQ ID NO: 27617 - protein, 9 aa, Homo sapiens
  AACR GENIE Results; TP53_p.F328Sfs*17; B0702
GEYSPFRSV

SEQ ID NO: 27618 - protein, 10 aa, Homo sapiens
  AACR GENIE Results; TP53_p.F328Sfs*17; B3501
KPLDGEYSPF

SEQ ID NO: 27619 - protein, 9 aa, Homo sapiens
  AACR GENIE Results; TP53_p.F328Sfs*17; B1801
GEYSPFRSV

SEQ ID NO: 27620 - protein, 10 aa, Homo sapiens
  AACR GENIE Results; TP53_p.F328Sfs*17; B0702
KPLDGEYSPF

SEQ ID NO: 27621 - protein, 9 aa, Homo sapiens
  AACR GENIE Results; TP53_p.G105C; B1501
SQKTYQCSY

SEQ ID NO: 27622 - protein, 9 aa, Homo sapiens
  AACR GENIE Results; TP53_p.G105C; B0801
VPSQKTYQC

SEQ ID NO: 27623 - protein, 9 aa, Homo sapiens
  AACR GENIE Results; TP53_p.G105C; A2902
CSYGFRLGF

SEQ ID NO: 27624 - protein, 9 aa, Homo sapiens
  AACR GENIE Results; TP53_p.G105C; B0702
VPSQKTYQC

SEQ ID NO: 27625 - protein, 9 aa, Homo sapiens
  AACR GENIE Results; TP53_p.G105C; B5701
CSYGFRLGF

SEQ ID NO: 27626 - protein, 9 aa, Homo sapiens
  AACR GENIE Results; TP53_p.G105C; B5701
KTYQCSYGF

SEQ ID NO: 27627 - protein, 9 aa, Homo sapiens
  AACR GENIE Results; TP53_p.G105D; B1501
SQKTYQDSY

SEQ ID NO: 27628 - protein, 11 aa, Homo sapiens
  AACR GENIE Results; TP53_p.G105D; B3501
VPSQKTYQDSY

SEQ ID NO: 27629 - protein, 11 aa, Homo sapiens
  AACR GENIE Results; TP53_p.G105D; A0301
KTYQDSYGFRL

SEQ ID NO: 27630 - protein, 10 aa, Homo sapiens
  AACR GENIE Results; TP53_p.G105D; A2402
TYQDSYGFRL

SEQ ID NO: 27631 - protein, 8 aa, Homo sapiens
  AACR GENIE Results; TP53_p.G105D; A2402
TYQDSYGF

SEQ ID NO: 27632 - protein, 9 aa, Homo sapiens
  AACR GENIE Results; TP53_p.G105D; C0501
YQDSYGFRL

SEQ ID NO: 27633 - protein, 9 aa, Homo sapiens
  AACR GENIE Results; TP53_p.G105D; B1501
KTYQDSYGF

SEQ ID NO: 27634 - protein, 10 aa, Homo sapiens
  AACR GENIE Results; TP53_p.G105D; A0301
KTYQDSYGFR

SEQ ID NO: 27635 - protein, 9 aa, Homo sapiens
  AACR GENIE Results; TP53_p.G105S; B1501
SQKTYQSSY

SEQ ID NO: 27636 - protein, 9 aa, Homo sapiens
  AACR GENIE Results; TP53_p.G105S; A3002
SQKTYQSSY

SEQ ID NO: 27637 - protein, 9 aa, Homo sapiens
  AACR GENIE Results; TP53_p.G105S; B5701
KTYQSSYGF

SEQ ID NO: 27638 - protein, 9 aa, Homo sapiens
  AACR GENIE Results; TP53_p.G105S; B5801
KTYQSSYGF

SEQ ID NO: 27639 - protein, 8 aa, Homo sapiens
  AACR GENIE Results; TP53_p.G105S; A2301
TYQSSYGF

SEQ ID NO: 27640 - protein, 9 aa, Homo sapiens
  AACR GENIE Results; TP53_p.G105S; A3201
KTYQSSYGF

SEQ ID NO: 27641 - protein, 11 aa, Homo sapiens
  AACR GENIE Results; TP53_p.G105S; B0702
VPSQKTYQSSY

SEQ ID NO: 27642 - protein, 9 aa, Homo sapiens
  AACR GENIE Results; TP53_p.G105S; A0301
SSYGFRLGF

SEQ ID NO: 27643 - protein, 8 aa, Homo sapiens
  AACR GENIE Results; TP53_p.G105S; A2402
TYQSSYGF

SEQ ID NO: 27644 - protein, 9 aa, Homo sapiens
  AACR GENIE Results; TP53_p.G105S; A2902
SSYGFRLGF

SEQ ID NO: 27645 - protein, 11 aa, Homo sapiens
  AACR GENIE Results; TP53_p.G105S; B3501
VPSQKTYQSSY

SEQ ID NO: 27646 - protein, 9 aa, Homo sapiens
  AACR GENIE Results; TP53_p.G105S; A3303
TYQSSYGFR

SEQ ID NO: 27647 - protein, 11 aa, Homo sapiens
  AACR GENIE Results; TP53_p.G105S; A0301
KTYQSSYGFRL

SEQ ID NO: 27648 - protein, 10 aa, Homo sapiens
  AACR GENIE Results; TP53_p.G105S; A2301
TYQSSYGFRL

SEQ ID NO: 27649 - protein, 9 aa, Homo sapiens
  AACR GENIE Results; TP53_p.G105S; B5701
SSYGFRLGF

SEQ ID NO: 27650 - protein, 8 aa, Homo sapiens
  AACR GENIE Results; TP53_p.G105S; C1402
TYQSSYGF

SEQ ID NO: 27651 - protein, 9 aa, Homo sapiens
  AACR GENIE Results; TP53_p.G105S; A1101
SSYGFRLGF

SEQ ID NO: 27652 - protein, 9 aa, Homo sapiens
  AACR GENIE Results; TP53_p.G105S; C0202
SQKTYQSSY

SEQ ID NO: 27653 - protein, 9 aa, Homo sapiens
  AACR GENIE Results; TP53_p.G105S; B1501
KTYQSSYGF

SEQ ID NO: 27654 - protein, 10 aa, Homo sapiens
  AACR GENIE Results; TP53_p.G105S; A2402
TYQSSYGFRL

SEQ ID NO: 27655 - protein, 9 aa, Homo sapiens
  AACR GENIE Results; TP53_p.G105S; A3201
SQKTYQSSY

SEQ ID NO: 27656 - protein, 9 aa, Homo sapiens
  AACR GENIE Results; TP53_p.G105S; A2601
SQKTYQSSY

SEQ ID NO: 27657 - protein, 10 aa, Homo sapiens
  AACR GENIE Results; TP53_p.G105S; A3101
KTYQSSYGFR

SEQ ID NO: 27658 - protein, 9 aa, Homo sapiens
  AACR GENIE Results; TP53_p.G105S; A3101
TYQSSYGFR

SEQ ID NO: 27659 - protein, 8 aa, Homo sapiens
  AACR GENIE Results; TP53_p.G105S; B3901
TYQSSYGF

SEQ ID NO: 27660 - protein, 10 aa, Homo sapiens
  AACR GENIE Results; TP53_p.G105S; A0301
KTYQSSYGFR

SEQ ID NO: 27661 - protein, 9 aa, Homo sapiens
  AACR GENIE Results; TP53_p.G105S; C1601
SSYGFRLGF

SEQ ID NO: 27662 - protein, 9 aa, Homo sapiens
  AACR GENIE Results; TP53_p.G105S; A3002
KTYQSSYGF

SEQ ID NO: 27663 - protein, 9 aa, Homo sapiens
  AACR GENIE Results; TP53_p.G105V; B1501
SQKTYQVSY

SEQ ID NO: 27664 - protein, 9 aa, Homo sapiens
  AACR GENIE Results; TP53_p.G105V; B0801
VPSQKTYQV

SEQ ID NO: 27665 - protein, 9 aa, Homo sapiens
  AACR GENIE Results; TP53_p.G105V; B0702
VPSQKTYQV

SEQ ID NO: 27666 - protein, 11 aa, Homo sapiens
  AACR GENIE Results; TP53_p.G105V; B3501
VPSQKTYQVSY

SEQ ID NO: 27667 - protein, 9 aa, Homo sapiens
  AACR GENIE Results; TP53_p.G105V; B5101
VPSQKTYQV

SEQ ID NO: 27668 - protein, 8 aa, Homo sapiens
  AACR GENIE Results; TP53_p.G105V; A2402
TYQVSYGF

SEQ ID NO: 27669 - protein, 9 aa, Homo sapiens
  AACR GENIE Results; TP53_p.G105V; A3201
SQKTYQVSY

SEQ ID NO: 27670 - protein, 9 aa, Homo sapiens
  AACR GENIE Results; TP53_p.G105V; C0202
SQKTYQVSY

SEQ ID NO: 27671 - protein, 11 aa, Homo sapiens
  AACR GENIE Results; TP53_p.G105V; B0702
VPSQKTYQVSY

SEQ ID NO: 27672 - protein, 11 aa, Homo sapiens
  AACR GENIE Results; TP53_p.G105V; A0301
KTYQVSYGFRL

SEQ ID NO: 27673 - protein, 9 aa, Homo sapiens
  AACR GENIE Results; TP53_p.G105V; A3201
KTYQVSYGF

SEQ ID NO: 27674 - protein, 9 aa, Homo sapiens
  AACR GENIE Results; TP53_p.G105V; B0801
SQKTYQVSY

SEQ ID NO: 27675 - protein, 9 aa, Homo sapiens
  AACR GENIE Results; TP53_p.G105V; C1203
SQKTYQVSY

SEQ ID NO: 27676 - protein, 10 aa, Homo sapiens
  AACR GENIE Results; TP53_p.G105V; A0301
KTYQVSYGFR

SEQ ID NO: 27677 - protein, 9 aa, Homo sapiens
  AACR GENIE Results; TP53_p.G105V; C1601
VSYGFRLGF

SEQ ID NO: 27678 - protein, 9 aa, Homo sapiens
  AACR GENIE Results; TP53_p.G108S; B5701
KTYQGSYSF

SEQ ID NO: 27679 - protein, 9 aa, Homo sapiens
  AACR GENIE Results; TP53_p.G108S; A3201
KTYQGSYSF

SEQ ID NO: 27680 - protein, 9 aa, Homo sapiens
  AACR GENIE Results; TP53_p.G108S; A3303
TYQGSYSFR

SEQ ID NO: 27681 - protein, 10 aa, Homo sapiens
  AACR GENIE Results; TP53_p.G108S; A0301
KTYQGSYSFR

SEQ ID NO: 27682 - protein, 10 aa, Homo sapiens
  AACR GENIE Results; TP53_p.G108S; A3101
KTYQGSYSFR

SEQ ID NO: 27683 - protein, 8 aa, Homo sapiens
  AACR GENIE Results; TP53_p.G108S; A2301
TYQGSYSF

SEQ ID NO: 27684 - protein, 9 aa, Homo sapiens
  AACR GENIE Results; TP53_p.G108S; A3101
TYQGSYSFR

SEQ ID NO: 27685 - protein, 9 aa, Homo sapiens
  AACR GENIE Results; TP53_p.G108S; B1501
KTYQGSYSF

SEQ ID NO: 27686 - protein, 8 aa, Homo sapiens
  AACR GENIE Results; TP53_p.G108S; C1402
TYQGSYSF

SEQ ID NO: 27687 - protein, 8 aa, Homo sapiens
  AACR GENIE Results; TP53_p.G108S; A2402
TYQGSYSF

SEQ ID NO: 27688 - protein, 9 aa, Homo sapiens
  AACR GENIE Results; TP53_p.G108S; A0301
KTYQGSYSF

SEQ ID NO: 27689 - protein, 11 aa, Homo sapiens
  AACR GENIE Results; TP53_p.G108S; A0301
KTYQGSYSFRL

SEQ ID NO: 27690 - protein, 9 aa, Homo sapiens
  AACR GENIE Results; TP53_p.G108S; A2301
KTYQGSYSF

SEQ ID NO: 27691 - protein, 8 aa, Homo sapiens
  AACR GENIE Results; TP53_p.G108S; C1402
SYSFRLGF

SEQ ID NO: 27692 - protein, 9 aa, Homo sapiens
  AACR GENIE Results; TP53_p.G108S; B5701
GSYSFRLGF

SEQ ID NO: 27693 - protein, 9 aa, Homo sapiens
  AACR GENIE Results; TP53_p.G108S; A1101
KTYQGSYSF

SEQ ID NO: 27694 - protein, 9 aa, Homo sapiens
  AACR GENIE Results; TP53_p.G108S; A2902
GSYSFRLGF

SEQ ID NO: 27695 - protein, 9 aa, Homo sapiens
  AACR GENIE Results; TP53_p.G108S; A3001
KTYQGSYSF

SEQ ID NO: 27696 - protein, 9 aa, Homo sapiens
  AACR GENIE Results; TP53_p.G108S; A0301
GSYSFRLGF

SEQ ID NO: 27697 - protein, 10 aa, Homo sapiens
  AACR GENIE Results; TP53_p.G108S; A1101
KTYQGSYSFR

SEQ ID NO: 27698 - protein, 9 aa, Homo sapiens
  AACR GENIE Results; TP53_p.G108S; C0701
KTYQGSYSF

SEQ ID NO: 27699 - protein, 9 aa, Homo sapiens
  AACR GENIE Results; TP53_p.G108S; A2402
KTYQGSYSF

SEQ ID NO: 27700 - protein, 8 aa, Homo sapiens
  AACR GENIE Results; TP53_p.G108S; B3901
TYQGSYSF

SEQ ID NO: 27701 - protein, 11 aa, Homo sapiens
  AACR GENIE Results; TP53_p.G108S; B5701
KTYQGSYSFRL

SEQ ID NO: 27702 - protein, 9 aa, Homo sapiens
  AACR GENIE Results; TP53_p.G108S; C1601
KTYQGSYSF

SEQ ID NO: 27703 - protein, 9 aa, Homo sapiens
  AACR GENIE Results; TP53_p.G108S; A3101
KTYQGSYSF

SEQ ID NO: 27704 - protein, 9 aa, Homo sapiens
  AACR GENIE Results; TP53_p.G108S; C1203
KTYQGSYSF

SEQ ID NO: 27705 - protein, 9 aa, Homo sapiens
  AACR GENIE Results; TP53_p.G108S; A2902
KTYQGSYSF

SEQ ID NO: 27706 - protein, 9 aa, Homo sapiens
  AACR GENIE Results; TP53_p.G108S; C1402
SYSFRLGFL

SEQ ID NO: 27707 - protein, 9 aa, Homo sapiens
  AACR GENIE Results; TP53_p.G108S; B0702
KTYQGSYSF

SEQ ID NO: 27708 - protein, 11 aa, Homo sapiens
  AACR GENIE Results; TP53_p.G108S; B1501
SQKTYQGSYSF

SEQ ID NO: 27709 - protein, 9 aa, Homo sapiens
  AACR GENIE Results; TP53_p.G108S; C0202
KTYQGSYSF

SEQ ID NO: 27710 - protein, 10 aa, Homo sapiens
  AACR GENIE Results; TP53_p.G108S; A2301
TYQGSYSFRL

SEQ ID NO: 27711 - protein, 9 aa, Homo sapiens
  AACR GENIE Results; TP53_p.G154Afs*16; B0702
APWPSTSSH

SEQ ID NO: 27712 - protein, 9 aa, Homo sapiens
  AACR GENIE Results; TP53_p.G154Afs*16; B3501
APWPSTSSH

SEQ ID NO: 27713 - protein, 11 aa, Homo sapiens
  AACR GENIE Results; TP53_p.G154Afs*16; B3501
TPPPAPASAPW

SEQ ID NO: 27714 - protein, 11 aa, Homo sapiens
  AACR GENIE Results; TP53_p.G154Afs*16; B3501
APWPSTSSHST

SEQ ID NO: 27715 - protein, 10 aa, Homo sapiens
  AACR GENIE Results; TP53_p.G154Afs*16; A0201
STPPPAPASA

SEQ ID NO: 27716 - protein, 9 aa, Homo sapiens
  AACR GENIE Results; TP53_p.G154V; A6801
DSTPPPVTR

SEQ ID NO: 27717 - protein, 9 aa, Homo sapiens
  AACR GENIE Results; TP53_p.G154V; A3301
DSTPPPVTR

SEQ ID NO: 27718 - protein, 8 aa, Homo sapiens
  AACR GENIE Results; TP53_p.G154V; B5101
TPPPVTRV

SEQ ID NO: 27719 - protein, 9 aa, Homo sapiens
  AACR GENIE Results; TP53_p.G154V; A3303
DSTPPPVTR

SEQ ID NO: 27720 - protein, 9 aa, Homo sapiens
  AACR GENIE Results; TP53_p.G154V; A6802
STPPPVTRV

SEQ ID NO: 27721 - protein, 10 aa, Homo sapiens
  AACR GENIE Results; TP53_p.G154V; A6801
VDSTPPPVTR

SEQ ID NO: 27722 - protein, 9 aa, Homo sapiens
  AACR GENIE Results; TP53_p.G154V; A0205
STPPPVTRV

SEQ ID NO: 27723 - protein, 10 aa, Homo sapiens
  AACR GENIE Results; TP53_p.G154V; A3303
VDSTPPPVTR

SEQ ID NO: 27724 - protein, 10 aa, Homo sapiens
  AACR GENIE Results; TP53_p.G154V; A6802
VDSTPPPVTR

SEQ ID NO: 27725 - protein, 10 aa, Homo sapiens
  AACR GENIE Results; TP53_p.G154V; A3301
VDSTPPPVTR

SEQ ID NO: 27726 - protein, 10 aa, Homo sapiens
  AACR GENIE Results; TP53_p.G154V; A6802
DSTPPPVTRV

SEQ ID NO: 27727 - protein, 9 aa, Homo sapiens
  AACR GENIE Results; TP53_p.G154V; A0201
STPPPVTRV

SEQ ID NO: 27728 - protein, 9 aa, Homo sapiens
  AACR GENIE Results; TP53_p.G154V; A3303
TPPPVTRVR

SEQ ID NO: 27729 - protein, 9 aa, Homo sapiens
  AACR GENIE Results; TP53_p.G154V; A6801
TPPPVTRVR

SEQ ID NO: 27730 - protein, 11 aa, Homo sapiens
  AACR GENIE Results; TP53_p.G154V; A6801
DSTPPPVTRVR

SEQ ID NO: 27731 - protein, 10 aa, Homo sapiens
  AACR GENIE Results; TP53_p.G154V; A1101
STPPPVTRVR

SEQ ID NO: 27732 - protein, 8 aa, Homo sapiens
  AACR GENIE Results; TP53_p.G154V; A3303
STPPPVTR

SEQ ID NO: 27733 - protein, 8 aa, Homo sapiens
  AACR GENIE Results; TP53_p.G154V; B3701
VDSTPPPV

SEQ ID NO: 27734 - protein, 8 aa, Homo sapiens
  AACR GENIE Results; TP53_p.G154V; A3101
STPPPVTR

SEQ ID NO: 27735 - protein, 9 aa, Homo sapiens
  AACR GENIE Results; TP53_p.G154V; A1101
STPPPVTRV

SEQ ID NO: 27736 - protein, 10 aa, Homo sapiens
  AACR GENIE Results; TP53_p.G154V; A6801
STPPPVTRVR

SEQ ID NO: 27737 - protein, 9 aa, Homo sapiens
  AACR GENIE Results; TP53_p.G154V; C1502
STPPPVTRV

SEQ ID NO: 27738 - protein, 9 aa, Homo sapiens
  AACR GENIE Results; TP53_p.G154V; A6801
STPPPVTRV

SEQ ID NO: 27739 - protein, 10 aa, Homo sapiens
  AACR GENIE Results; TP53_p.G154V; B2702
VDSTPPPVTR

SEQ ID NO: 27740 - protein, 10 aa, Homo sapiens
  AACR GENIE Results; TP53_p.G154V; A1101
VDSTPPPVTR

SEQ ID NO: 27741 - protein, 8 aa, Homo sapiens
  AACR GENIE Results; TP53_p.G154V; A1101
STPPPVTR

SEQ ID NO: 27742 - protein, 9 aa, Homo sapiens
  AACR GENIE Results; TP53_p.G154V; A6802
DSTPPPVTR

SEQ ID NO: 27743 - protein, 9 aa, Homo sapiens
  AACR GENIE Results; TP53_p.G154V; A3001
VDSTPPPVT

SEQ ID NO: 27744 - protein, 10 aa, Homo sapiens
  AACR GENIE Results; TP53_p.G154V; A3101
VDSTPPPVTR

SEQ ID NO: 27745 - protein, 8 aa, Homo sapiens
  AACR GENIE Results; TP53_p.G154V; B4002
VDSTPPPV

SEQ ID NO: 27746 - protein, 10 aa, Homo sapiens
  AACR GENIE Results; TP53_p.G154V; A3303
STPPPVTRVR

SEQ ID NO: 27747 - protein, 9 aa, Homo sapiens
  AACR GENIE Results; TP53_p.G154V; A0201
WVDSTPPPV

SEQ ID NO: 27748 - protein, 10 aa, Homo sapiens
  AACR GENIE Results; TP53_p.G154V; A3101
STPPPVTRVR

SEQ ID NO: 27749 - protein, 9 aa, Homo sapiens
  AACR GENIE Results; TP53_p.G154V; A2601
STPPPVTRV

SEQ ID NO: 27750 - protein, 8 aa, Homo sapiens
  AACR GENIE Results; TP53_p.G154V; A6801
STPPPVTR

SEQ ID NO: 27751 - protein, 9 aa, Homo sapiens
  AACR GENIE Results; TP53_p.G154V; C0102
STPPPVTRV

SEQ ID NO: 27752 - protein, 9 aa, Homo sapiens
  AACR GENIE Results; TP53_p.G154V; B5701
DSTPPPVTR

SEQ ID NO: 27753 - protein, 9 aa, Homo sapiens
  AACR GENIE Results; TP53_p.G154V; A3101
DSTPPPVTR

SEQ ID NO: 27754 - protein, 9 aa, Homo sapiens
  AACR GENIE Results; TP53_p.G199E; B1801
VEENLRVEY

SEQ ID NO: 27755 - protein, 9 aa, Homo sapiens
  AACR GENIE Results; TP53_p.G199E; B4403
VEENLRVEY

SEQ ID NO: 27756 - protein, 8 aa, Homo sapiens
  AACR GENIE Results; TP53_p.G199E; B1801
EENLRVEY

SEQ ID NO: 27757 - protein, 9 aa, Homo sapiens
  AACR GENIE Results; TP53_p.G199E; B4402
VEENLRVEY

SEQ ID NO: 27758 - protein, 10 aa, Homo sapiens
  AACR GENIE Results; TP53_p.G199E; B4001
VEENLRVEYL

SEQ ID NO: 27759 - protein, 8 aa, Homo sapiens
  AACR GENIE Results; TP53_p.G199E; B4403
EENLRVEY

SEQ ID NO: 27760 - protein, 9 aa, Homo sapiens
  AACR GENIE Results; TP53_p.G199E; A2301
VEENLRVEY

SEQ ID NO: 27761 - protein, 10 aa, Homo sapiens
  AACR GENIE Results; TP53_p.G199E; B5701
RVEENLRVEY

SEQ ID NO: 27762 - protein, 9 aa, Homo sapiens
  AACR GENIE Results; TP53_p.G199E; B4403
EENLRVEYL

SEQ ID NO: 27763 - protein, 9 aa, Homo sapiens
  AACR GENIE Results; TP53_p.G199E; B4402
EENLRVEYL

SEQ ID NO: 27764 - protein, 10 aa, Homo sapiens
  AACR GENIE Results; TP53_p.G199E; B1501
RVEENLRVEY

SEQ ID NO: 27765 - protein, 8 aa, Homo sapiens
  AACR GENIE Results; TP53_p.G199E; B4402
EENLRVEY

SEQ ID NO: 27766 - protein, 9 aa, Homo sapiens
  AACR GENIE Results; TP53_p.G199E; B4001
VEENLRVEY

SEQ ID NO: 27767 - protein, 9 aa, Homo sapiens
  AACR GENIE Results; TP53_p.G199E; B1501
VEENLRVEY

SEQ ID NO: 27768 - protein, 8 aa, Homo sapiens
  AACR GENIE Results; TP53_p.G199E; B0801
EENLRVEY

SEQ ID NO: 27769 - protein, 9 aa, Homo sapiens
  AACR GENIE Results; TP53_p.G199E; B4001
EENLRVEYL

SEQ ID NO: 27770 - protein, 10 aa, Homo sapiens
  AACR GENIE Results; TP53_p.G199E; A0101
RVEENLRVEY

SEQ ID NO: 27771 - protein, 8 aa, Homo sapiens
  AACR GENIE Results; TP53_p.G199E; A2301
EENLRVEY

SEQ ID NO: 27772 - protein, 9 aa, Homo sapiens
  AACR GENIE Results; TP53_p.G199E; A2301
EENLRVEYL

SEQ ID NO: 27773 - protein, 9 aa, Homo sapiens
  AACR GENIE Results; TP53_p.G199E; B3501
VEENLRVEY

SEQ ID NO: 27774 - protein, 10 aa, Homo sapiens
  AACR GENIE Results; TP53_p.G199E; B3501
RVEENLRVEY

SEQ ID NO: 27775 - protein, 9 aa, Homo sapiens
  AACR GENIE Results; TP53_p.G199E; B1801
EENLRVEYL

SEQ ID NO: 27776 - protein, 9 aa, Homo sapiens
  AACR GENIE Results; TP53_p.G199V; B1801
VEVNLRVEY

SEQ ID NO: 27777 - protein, 9 aa, Homo sapiens
  AACR GENIE Results; TP53_p.G199V; B4403
VEVNLRVEY

SEQ ID NO: 27778 - protein, 9 aa, Homo sapiens
  AACR GENIE Results; TP53_p.G199V; B4402
VEVNLRVEY

SEQ ID NO: 27779 - protein, 9 aa, Homo sapiens
  AACR GENIE Results; TP53_p.G199V; A2301
VEVNLRVEY

SEQ ID NO: 27780 - protein, 9 aa, Homo sapiens
  AACR GENIE Results; TP53_p.G199V; B1501
VEVNLRVEY

SEQ ID NO: 27781 - protein, 10 aa, Homo sapiens
  AACR GENIE Results; TP53_p.G199V; B4001
VEVNLRVEYL

SEQ ID NO: 27782 - protein, 9 aa, Homo sapiens
  AACR GENIE Results; TP53_p.G199V; B0801
EVNLRVEYL

SEQ ID NO: 27783 - protein, 10 aa, Homo sapiens
  AACR GENIE Results; TP53_p.G199V; B5701
RVEVNLRVEY

SEQ ID NO: 27784 - protein, 9 aa, Homo sapiens
  AACR GENIE Results; TP53_p.G199V; B3501
VEVNLRVEY

SEQ ID NO: 27785 - protein, 9 aa, Homo sapiens
  AACR GENIE Results; TP53_p.G199V; B4001
VEVNLRVEY

SEQ ID NO: 27786 - protein, 9 aa, Homo sapiens
  AACR GENIE Results; TP53_p.G199V; A3001
VEVNLRVEY

SEQ ID NO: 27787 - protein, 8 aa, Homo sapiens
  AACR GENIE Results; TP53_p.G199V; A2601
EVNLRVEY

SEQ ID NO: 27788 - protein, 9 aa, Homo sapiens
  AACR GENIE Results; TP53_p.G199V; B1402
EVNLRVEYL

SEQ ID NO: 27789 - protein, 8 aa, Homo sapiens
  AACR GENIE Results; TP53_p.G199V; B0801
EVNLRVEY

SEQ ID NO: 27790 - protein, 9 aa, Homo sapiens
  AACR GENIE Results; TP53_p.G199V; A0201
HLIRVEVNL

SEQ ID NO: 27791 - protein, 8 aa, Homo sapiens
  AACR GENIE Results; TP53_p.G199V; C1601
EVNLRVEY

SEQ ID NO: 27792 - protein, 10 aa, Homo sapiens
  AACR GENIE Results; TP53_p.G199V; A0101
RVEVNLRVEY

SEQ ID NO: 27793 - protein, 9 aa, Homo sapiens
  AACR GENIE Results; TP53_p.G244D; B1402
DGMNRRPIL

SEQ ID NO: 27794 - protein, 9 aa, Homo sapiens
  AACR GENIE Results; TP53_p.G244D; B0801
DGMNRRPIL

SEQ ID NO: 27795 - protein, 8 aa, Homo sapiens
  AACR GENIE Results; TP53_p.G244S; A3303
SCMSGMNR

SEQ ID NO: 27796 - protein, 8 aa, Homo sapiens
  AACR GENIE Results; TP53_p.G244S; A1101
SCMSGMNR

SEQ ID NO: 27797 - protein, 9 aa, Homo sapiens
  AACR GENIE Results; TP53_p.G244V; A1101
SSCMVGMNR

SEQ ID NO: 27798 - protein, 8 aa, Homo sapiens
  AACR GENIE Results; TP53_p.G244V; A1101
SCMVGMNR

SEQ ID NO: 27799 - protein, 8 aa, Homo sapiens
  AACR GENIE Results; TP53_p.G245A; A1101
SCMGAMNR

SEQ ID NO: 27800 - protein, 8 aa, Homo sapiens
  AACR GENIE Results; TP53_p.G245A; A3101
SCMGAMNR

SEQ ID NO: 27801 - protein, 8 aa, Homo sapiens
  AACR GENIE Results; TP53_p.G245A; A6801
SCMGAMNR

SEQ ID NO: 27802 - protein, 9 aa, Homo sapiens
  AACR GENIE Results; TP53_p.G245A; C1601
GAMNRRPIL

SEQ ID NO: 27803 - protein, 9 aa, Homo sapiens
  AACR GENIE Results; TP53_p.G245A; A6801
SSCMGAMNR

SEQ ID NO: 27804 - protein, 10 aa, Homo sapiens
  AACR GENIE Results; TP53_p.G245A; A6801
NSSCMGAMNR

SEQ ID NO: 27805 - protein, 8 aa, Homo sapiens
  AACR GENIE Results; TP53_p.G245D; B0801
DMNRRPIL

SEQ ID NO: 27806 - protein, 8 aa, Homo sapiens
  AACR GENIE Results; TP53_p.G245S; A3303
SCMGSMNR

SEQ ID NO: 27807 - protein, 8 aa, Homo sapiens
  AACR GENIE Results; TP53_p.G245S; A3101
SCMGSMNR

SEQ ID NO: 27808 - protein, 9 aa, Homo sapiens
  AACR GENIE Results; TP53_p.G245S; B4102
GSMNRRPIL

SEQ ID NO: 27809 - protein, 9 aa, Homo sapiens
  AACR GENIE Results; TP53_p.G245V; A6801
SSCMGVMNR

SEQ ID NO: 27810 - protein, 10 aa, Homo sapiens
  AACR GENIE Results; TP53_p.G245V; A6801
NSSCMGVMNR

SEQ ID NO: 27811 - protein, 8 aa, Homo sapiens
  AACR GENIE Results; TP53_p.G245V; A3303
SCMGVMNR

SEQ ID NO: 27812 - protein, 8 aa, Homo sapiens
  AACR GENIE Results; TP53_p.G245V; A3101
SCMGVMNR

SEQ ID NO: 27813 - protein, 8 aa, Homo sapiens
  AACR GENIE Results; TP53_p.G245V; A6801
SCMGVMNR

SEQ ID NO: 27814 - protein, 9 aa, Homo sapiens
  AACR GENIE Results; TP53_p.G245V; A3101
SSCMGVMNR

SEQ ID NO: 27815 - protein, 8 aa, Homo sapiens
  AACR GENIE Results; TP53_p.G245V; A1101
SCMGVMNR

SEQ ID NO: 27816 - protein, 9 aa, Homo sapiens
  AACR GENIE Results; TP53_p.G245V; A1101
SSCMGVMNR

SEQ ID NO: 27817 - protein, 9 aa, Homo sapiens
  AACR GENIE Results; TP53_p.G245V; A3303
SSCMGVMNR

SEQ ID NO: 27818 - protein, 9 aa, Homo sapiens
  AACR GENIE Results; TP53_p.G245V; A3303
SCMGVMNRR

SEQ ID NO: 27819 - protein, 9 aa, Homo sapiens
  AACR GENIE Results; TP53_p.G245V; A3101
SCMGVMNRR

SEQ ID NO: 27820 - protein, 9 aa, Homo sapiens
  AACR GENIE Results; TP53_p.G262V; A6801
DSSVNLLGR

SEQ ID NO: 27821 - protein, 9 aa, Homo sapiens
  AACR GENIE Results; TP53_p.G262V; B4001
LEDSSVNLL

SEQ ID NO: 27822 - protein, 10 aa, Homo sapiens
  AACR GENIE Results; TP53_p.G262V; A6801
EDSSVNLLGR

SEQ ID NO: 27823 - protein, 10 aa, Homo sapiens
  AACR GENIE Results; TP53_p.G262V; A3201
SVNLLGRNSF

SEQ ID NO: 27824 - protein, 8 aa, Homo sapiens
  AACR GENIE Results; TP53_p.G262V; B4001
LEDSSVNL

SEQ ID NO: 27825 - protein, 9 aa, Homo sapiens
  AACR GENIE Results; TP53_p.G262V; C0802
TLEDSSVNL

SEQ ID NO: 27826 - protein, 10 aa, Homo sapiens
  AACR GENIE Results; TP53_p.G262V; B0702
SVNLLGRNSF

SEQ ID NO: 27827 - protein, 10 aa, Homo sapiens
  AACR GENIE Results; TP53_p.G262V; B1501
SVNLLGRNSF

SEQ ID NO: 27828 - protein, 9 aa, Homo sapiens
  AACR GENIE Results; TP53_p.G262V; A0201
TLEDSSVNL

SEQ ID NO: 27829 - protein, 9 aa, Homo sapiens
  AACR GENIE Results; TP53_p.G262V; C0802
LEDSSVNLL

SEQ ID NO: 27830 - protein, 9 aa, Homo sapiens
  AACR GENIE Results; TP53_p.G262V; C0501
TLEDSSVNL

SEQ ID NO: 27831 - protein, 8 aa, Homo sapiens
  AACR GENIE Results; TP53_p.G262V; C0802
LEDSSVNL

SEQ ID NO: 27832 - protein, 9 aa, Homo sapiens
  AACR GENIE Results; TP53_p.G266E; A6801
DSSGNLLER

SEQ ID NO: 27833 - protein, 9 aa, Homo sapiens
  AACR GENIE Results; TP53_p.G266E; A3301
DSSGNLLER

SEQ ID NO: 27834 - protein, 9 aa, Homo sapiens
  AACR GENIE Results; TP53_p.G266E; A3303
DSSGNLLER

SEQ ID NO: 27835 - protein, 10 aa, Homo sapiens
  AACR GENIE Results; TP53_p.G266E; A6801
EDSSGNLLER

SEQ ID NO: 27836 - protein, 9 aa, Homo sapiens
  AACR GENIE Results; TP53_p.G266E; C0602
ERNSFEVRV

SEQ ID NO: 27837 - protein, 10 aa, Homo sapiens
  AACR GENIE Results; TP53_p.G266E; A3303
EDSSGNLLER

SEQ ID NO: 27838 - protein, 10 aa, Homo sapiens
  AACR GENIE Results; TP53_p.G266E; A3301
EDSSGNLLER

SEQ ID NO: 27839 - protein, 9 aa, Homo sapiens
  AACR GENIE Results; TP53_p.G266E; B2705
ERNSFEVRV

SEQ ID NO: 27840 - protein, 11 aa, Homo sapiens
  AACR GENIE Results; TP53_p.G266E; A3301
NLLERNSFEVR

SEQ ID NO: 27841 - protein, 9 aa, Homo sapiens
  AACR GENIE Results; TP53_p.G266E; A6802
ERNSFEVRV

SEQ ID NO: 27842 - protein, 8 aa, Homo sapiens
  AACR GENIE Results; TP53_p.G266E; B4901
LERNSFEV

SEQ ID NO: 27843 - protein, 11 aa, Homo sapiens
  AACR GENIE Results; TP53_p.G266E; B2702
LEDSSGNLLER

SEQ ID NO: 27844 - protein, 9 aa, Homo sapiens
  AACR GENIE Results; TP53_p.G266E; B3901
ERNSFEVRV

SEQ ID NO: 27845 - protein, 8 aa, Homo sapiens
  AACR GENIE Results; TP53_p.G266E; A3001
LERNSFEV

SEQ ID NO: 27846 - protein, 10 aa, Homo sapiens
  AACR GENIE Results; TP53_p.G266E; A0201
NLLERNSFEV

SEQ ID NO: 27847 - protein, 10 aa, Homo sapiens
  AACR GENIE Results; TP53_p.G266E; B2702
EDSSGNLLER

SEQ ID NO: 27848 - protein, 9 aa, Homo sapiens
  AACR GENIE Results; TP53_p.G266E; B3801
ERNSFEVRV

SEQ ID NO: 27849 - protein, 11 aa, Homo sapiens
  AACR GENIE Results; TP53_p.G266E; A6801
LEDSSGNLLER

SEQ ID NO: 27850 - protein, 9 aa, Homo sapiens
  AACR GENIE Results; TP53_p.G266R; A6801
DSSGNLLRR

SEQ ID NO: 27851 - protein, 9 aa, Homo sapiens
  AACR GENIE Results; TP53_p.G266R; A3301
DSSGNLLRR

SEQ ID NO: 27852 - protein, 9 aa, Homo sapiens
  AACR GENIE Results; TP53_p.G266R; A6801
EDSSGNLLR

SEQ ID NO: 27853 - protein, 9 aa, Homo sapiens
  AACR GENIE Results; TP53_p.G266R; A3303
DSSGNLLRR

SEQ ID NO: 27854 - protein, 10 aa, Homo sapiens
  AACR GENIE Results; TP53_p.G266R; A6801
EDSSGNLLRR

SEQ ID NO: 27855 - protein, 9 aa, Homo sapiens
  AACR GENIE Results; TP53_p.G266R; C0602
RRNSFEVRV

SEQ ID NO: 27856 - protein, 11 aa, Homo sapiens
  AACR GENIE Results; TP53_p.G266R; A6801
TLEDSSGNLLR

SEQ ID NO: 27857 - protein, 9 aa, Homo sapiens
  AACR GENIE Results; TP53_p.G266R; A3303
EDSSGNLLR

SEQ ID NO: 27858 - protein, 9 aa, Homo sapiens
  AACR GENIE Results; TP53_p.G266R; A3301
EDSSGNLLR

SEQ ID NO: 27859 - protein, 8 aa, Homo sapiens
  AACR GENIE Results; TP53_p.G266R; A6801
DSSGNLLR

SEQ ID NO: 27860 - protein, 10 aa, Homo sapiens
  AACR GENIE Results; TP53_p.G266R; A3301
EDSSGNLLRR

SEQ ID NO: 27861 - protein, 10 aa, Homo sapiens
  AACR GENIE Results; TP53_p.G266R; A3303
EDSSGNLLRR

SEQ ID NO: 27862 - protein, 10 aa, Homo sapiens
  AACR GENIE Results; TP53_p.G266R; B2702
LEDSSGNLLR

SEQ ID NO: 27863 - protein, 11 aa, Homo sapiens
  AACR GENIE Results; TP53_p.G266R; B2702
TLEDSSGNLLR

SEQ ID NO: 27864 - protein, 9 aa, Homo sapiens
  AACR GENIE Results; TP53_p.G266R; B2705
RRNSFEVRV

SEQ ID NO: 27865 - protein, 9 aa, Homo sapiens
  AACR GENIE Results; TP53_p.G266R; B2702
EDSSGNLLR

SEQ ID NO: 27866 - protein, 9 aa, Homo sapiens
  AACR GENIE Results; TP53_p.G266V; A6801
DSSGNLLVR

SEQ ID NO: 27867 - protein, 9 aa, Homo sapiens
  AACR GENIE Results; TP53_p.G266V; A3301
DSSGNLLVR

SEQ ID NO: 27868 - protein, 9 aa, Homo sapiens
  AACR GENIE Results; TP53_p.G266V; A3303
DSSGNLLVR

SEQ ID NO: 27869 - protein, 9 aa, Homo sapiens
  AACR GENIE Results; TP53_p.G266V; C0602
VRNSFEVRV

SEQ ID NO: 27870 - protein, 10 aa, Homo sapiens
  AACR GENIE Results; TP53_p.G266V; A6801
EDSSGNLLVR

SEQ ID NO: 27871 - protein, 10 aa, Homo sapiens
  AACR GENIE Results; TP53_p.G266V; B4901
LEDSSGNLLV

SEQ ID NO: 27872 - protein, 10 aa, Homo sapiens
  AACR GENIE Results; TP53_p.G266V; A3303
EDSSGNLLVR

SEQ ID NO: 27873 - protein, 9 aa, Homo sapiens
  AACR GENIE Results; TP53_p.G266V; B2705
VRNSFEVRV

SEQ ID NO: 27874 - protein, 9 aa, Homo sapiens
  AACR GENIE Results; TP53_p.G266V; A3101
LVRNSFEVR

SEQ ID NO: 27875 - protein, 9 aa, Homo sapiens
  AACR GENIE Results; TP53_p.G266V; A3303
LVRNSFEVR

SEQ ID NO: 27876 - protein, 10 aa, Homo sapiens
  AACR GENIE Results; TP53_p.G266V; A3301
EDSSGNLLVR

SEQ ID NO: 27877 - protein, 11 aa, Homo sapiens
  AACR GENIE Results; TP53_p.G266V; B2702
LEDSSGNLLVR

SEQ ID NO: 27878 - protein, 11 aa, Homo sapiens
  AACR GENIE Results; TP53_p.G266V; B1302
TLEDSSGNLLV

SEQ ID NO: 27879 - protein, 8 aa, Homo sapiens
  AACR GENIE Results; TP53_p.G266V; A6801
SSGNLLVR

SEQ ID NO: 27880 - protein, 10 aa, Homo sapiens
  AACR GENIE Results; TP53_p.G266V; B2702
EDSSGNLLVR

SEQ ID NO: 27881 - protein, 9 aa, Homo sapiens
  AACR GENIE Results; TP53_p.G266V; A3301
LVRNSFEVR

SEQ ID NO: 27882 - protein, 9 aa, Homo sapiens
  AACR GENIE Results; TP53_p.G266V; A1101
DSSGNLLVR

SEQ ID NO: 27883 - protein, 8 aa, Homo sapiens
  AACR GENIE Results; TP53_p.G266V; B5101
DSSGNLLV

SEQ ID NO: 27884 - protein, 9 aa, Homo sapiens
  AACR GENIE Results; TP53_p.G334V; B5701
RVRERFEMF

SEQ ID NO: 27885 - protein, 10 aa, Homo sapiens
  AACR GENIE Results; TP53_p.G334W; B4403
GEYFTLQIRW

SEQ ID NO: 27886 - protein, 10 aa, Homo sapiens
  AACR GENIE Results; TP53_p.G334W; B4402
GEYFTLQIRW

SEQ ID NO: 27887 - protein, 9 aa, Homo sapiens
  AACR GENIE Results; TP53_p.G334W; A2402
EYFTLQIRW

SEQ ID NO: 27888 - protein, 9 aa, Homo sapiens
  AACR GENIE Results; TP53_p.G334W; B4403
EYFTLQIRW

SEQ ID NO: 27889 - protein, 8 aa, Homo sapiens
  AACR GENIE Results; TP53_p.G334W; B5701
YFTLQIRW

SEQ ID NO: 27890 - protein, 9 aa, Homo sapiens
  AACR GENIE Results; TP53_p.G334W; B5701
EYFTLQIRW

SEQ ID NO: 27891 - protein, 9 aa, Homo sapiens
  AACR GENIE Results; TP53_p.G334W; B4402
EYFTLQIRW

SEQ ID NO: 27892 - protein, 9 aa, Homo sapiens
  AACR GENIE Results; TP53_p.H168L; C0304
MAIYKQSQL

SEQ ID NO: 27893 - protein, 9 aa, Homo sapiens
  AACR GENIE Results; TP53_p.H168L; B0801
MAIYKQSQL

SEQ ID NO: 27894 - protein, 9 aa, Homo sapiens
  AACR GENIE Results; TP53_p.H168L; C1203
MAIYKQSQL

SEQ ID NO: 27895 - protein, 9 aa, Homo sapiens
  AACR GENIE Results; TP53_p.H168L; A0201
KQSQLMTEV

SEQ ID NO: 27896 - protein, 9 aa, Homo sapiens
  AACR GENIE Results; TP53_p.H168L; A0301
AIYKQSQLM

SEQ ID NO: 27897 - protein, 9 aa, Homo sapiens
  AACR GENIE Results; TP53_p.H168L; A1101
QLMTEVVRR

SEQ ID NO: 27898 - protein, 8 aa, Homo sapiens
  AACR GENIE Results; TP53_p.H168L; B0801
AIYKQSQL

SEQ ID NO: 27899 - protein, 9 aa, Homo sapiens
  AACR GENIE Results; TP53_p.H168L; B0702
MAIYKQSQL

SEQ ID NO: 27900 - protein, 9 aa, Homo sapiens
  AACR GENIE Results; TP53_p.H168L; A0201
QLMTEVVRR

SEQ ID NO: 27901 - protein, 9 aa, Homo sapiens
  AACR GENIE Results; TP53_p.H168L; A1101
AIYKQSQLM

SEQ ID NO: 27902 - protein, 8 aa, Homo sapiens
  AACR GENIE Results; TP53_p.H168L; B0702
AIYKQSQL

SEQ ID NO: 27903 - protein, 8 aa, Homo sapiens
  AACR GENIE Results; TP53_p.H168L; B0801
IYKQSQLM

SEQ ID NO: 27904 - protein, 9 aa, Homo sapiens
  AACR GENIE Results; TP53_p.H168R; B2705
QRMTEVVRR

SEQ ID NO: 27905 - protein, 8 aa, Homo sapiens
  AACR GENIE Results; TP53_p.H168R; B1302
SQRMTEVV

SEQ ID NO: 27906 - protein, 9 aa, Homo sapiens
  AACR GENIE Results; TP53_p.H168R; A6801
MAIYKQSQR

SEQ ID NO: 27907 - protein, 8 aa, Homo sapiens
  AACR GENIE Results; TP53_p.H168R; B1501
SQRMTEVV

SEQ ID NO: 27908 - protein, 8 aa, Homo sapiens
  AACR GENIE Results; TP53_p.H168R; A3101
RMTEVVRR

SEQ ID NO: 27909 - protein, 9 aa, Homo sapiens
  AACR GENIE Results; TP53_p.H168R; A3101
SQRMTEVVR

SEQ ID NO: 27910 - protein, 9 aa, Homo sapiens
  AACR GENIE Results; TP53_p.H168R; B1501
AIYKQSQRM

SEQ ID NO: 27911 - protein, 9 aa, Homo sapiens
  AACR GENIE Results; TP53_p.H168R; B1302
KQSQRMTEV

SEQ ID NO: 27912 - protein, 8 aa, Homo sapiens
  AACR GENIE Results; TP53_p.H168R; B2705
QRMTEVVR

SEQ ID NO: 27913 - protein, 9 aa, Homo sapiens
  AACR GENIE Results; TP53_p.H168R; A0301
AIYKQSQRM

SEQ ID NO: 27914 - protein, 9 aa, Homo sapiens
  AACR GENIE Results; TP53_p.H168R; B1302
AIYKQSQRM

SEQ ID NO: 27915 - protein, 9 aa, Homo sapiens
  AACR GENIE Results; TP53_p.H168R; B1501
SQRMTEVVR

SEQ ID NO: 27916 - protein, 10 aa, Homo sapiens
  AACR GENIE Results; TP53_p.H168R; A6801
QSQRMTEVVR

SEQ ID NO: 27917 - protein, 8 aa, Homo sapiens
  AACR GENIE Results; TP53_p.H168R; A3001
SQRMTEVV

SEQ ID NO: 27918 - protein, 10 aa, Homo sapiens
  AACR GENIE Results; TP53_p.H168R; A3101
SQRMTEVVRR

SEQ ID NO: 27919 - protein, 8 aa, Homo sapiens
  AACR GENIE Results; TP53_p.H168R; A0301
AIYKQSQR

SEQ ID NO: 27920 - protein, 9 aa, Homo sapiens
  AACR GENIE Results; TP53_p.H178Tfs*69; B4403
SEWKEICVW

SEQ ID NO: 27921 - protein, 9 aa, Homo sapiens
  AACR GENIE Results; TP53_p.H178Tfs*69; C1203
SAAQIAMVW

SEQ ID NO: 27922 - protein, 9 aa, Homo sapiens
  AACR GENIE Results; TP53_p.H178Tfs*69; B5101
VPPSTTTTC

SEQ ID NO: 27923 - protein, 9 aa, Homo sapiens
  AACR GENIE Results; TP53_p.H178Tfs*69; B4402
SEWKEICVW

SEQ ID NO: 27924 - protein, 9 aa, Homo sapiens
  AACR GENIE Results; TP53_p.H178Tfs*69; B3501
SAAQIAMVW

SEQ ID NO: 27925 - protein, 11 aa, Homo sapiens
  AACR GENIE Results; TP53_p.H178Tfs*69; A2402
VWPLLSILSEW

SEQ ID NO: 27926 - protein, 10 aa, Homo sapiens
  AACR GENIE Results; TP53_p.H178Tfs*69; B5101
VPPSTTTTCV

SEQ ID NO: 27927 - protein, 10 aa, Homo sapiens
  AACR GENIE Results; TP53_p.H178Tfs*69; B0702
VPPSTTTTCV

SEQ ID NO: 27928 - protein, 9 aa, Homo sapiens
  AACR GENIE Results; TP53_p.H178Tfs*69; B4403
TETLFDIVW

SEQ ID NO: 27929 - protein, 8 aa, Homo sapiens
  AACR GENIE Results; TP53_p.H178Tfs*69; B5101
VPPSTTTT

SEQ ID NO: 27930 - protein, 8 aa, Homo sapiens
  AACR GENIE Results; TP53_p.H178Tfs*69; B5101
SAAQIAMV

SEQ ID NO: 27931 - protein, 8 aa, Homo sapiens
  AACR GENIE Results; TP53_p.H178Tfs*69; B1801
TETLFDIV

SEQ ID NO: 27932 - protein, 10 aa, Homo sapiens
  AACR GENIE Results; TP53_p.H179Y; A3001
YERCSDSDGL

SEQ ID NO: 27933 - protein, 9 aa, Homo sapiens
  AACR GENIE Results; TP53_p.H193L; B1302
GLAPPQLLI

SEQ ID NO: 27934 - protein, 11 aa, Homo sapiens
  AACR GENIE Results; TP53_p.H193L; A0201
GLAPPQLLIRV

SEQ ID NO: 27935 - protein, 8 aa, Homo sapiens
  AACR GENIE Results; TP53_p.H193L; B5101
LAPPQLLI

SEQ ID NO: 27936 - protein, 9 aa, Homo sapiens
  AACR GENIE Results; TP53_p.H193L; A0201
GLAPPQLLI

SEQ ID NO: 27937 - protein, 8 aa, Homo sapiens
  AACR GENIE Results; TP53_p.H193L; B5101
DGLAPPQL

SEQ ID NO: 27938 - protein, 10 aa, Homo sapiens
  AACR GENIE Results; TP53_p.H193L; B5101
DGLAPPQLLI

SEQ ID NO: 27939 - protein, 9 aa, Homo sapiens
  AACR GENIE Results; TP53_p.H193P; A0201
GLAPPQPLI

SEQ ID NO: 27940 - protein, 8 aa, Homo sapiens
  AACR GENIE Results; TP53_p.H193P; B5101
LAPPQPLI

SEQ ID NO: 27941 - protein, 11 aa, Homo sapiens
  AACR GENIE Results; TP53_p.H193P; A0201
GLAPPQPLIRV

SEQ ID NO: 27942 - protein, 9 aa, Homo sapiens
  AACR GENIE Results; TP53_p.H193P; B5101
APPQPLIRV

SEQ ID NO: 27943 - protein, 10 aa, Homo sapiens
  AACR GENIE Results; TP53_p.H193P; A0301
GLAPPQPLIR

SEQ ID NO: 27944 - protein, 10 aa, Homo sapiens
  AACR GENIE Results; TP53_p.H193P; B5101
DGLAPPQPLI

SEQ ID NO: 27945 - protein, 9 aa, Homo sapiens
  AACR GENIE Results; TP53_p.H193P; B1501
GLAPPQPLI

SEQ ID NO: 27946 - protein, 9 aa, Homo sapiens
  AACR GENIE Results; TP53_p.H193P; B0702
APPQPLIRV

SEQ ID NO: 27947 - protein, 9 aa, Homo sapiens
  AACR GENIE Results; TP53_p.H193P; B5101
LAPPQPLIR

SEQ ID NO: 27948 - protein, 9 aa, Homo sapiens
  AACR GENIE Results; TP53_p.H193R; B1302
GLAPPQRLI

SEQ ID NO: 27949 - protein, 10 aa, Homo sapiens
  AACR GENIE Results; TP53_p.H193R; A6801
DSDGLAPPQR

SEQ ID NO: 27950 - protein, 10 aa, Homo sapiens
  AACR GENIE Results; TP53_p.H193R; B5101
DGLAPPQRLI

SEQ ID NO: 27951 - protein, 11 aa, Homo sapiens
  AACR GENIE Results; TP53_p.H193R; A0201
GLAPPQRLIRV

SEQ ID NO: 27952 - protein, 11 aa, Homo sapiens
  AACR GENIE Results; TP53_p.H193R; A6801
SDSDGLAPPQR

SEQ ID NO: 27953 - protein, 9 aa, Homo sapiens
  AACR GENIE Results; TP53_p.H193R; A0201
GLAPPQRLI

SEQ ID NO: 27954 - protein, 8 aa, Homo sapiens
  AACR GENIE Results; TP53_p.H193R; C1701
GLAPPQRL

SEQ ID NO: 27955 - protein, 9 aa, Homo sapiens
  AACR GENIE Results; TP53_p.H193R; B5101
DGLAPPQRL

SEQ ID NO: 27956 - protein, 8 aa, Homo sapiens
  AACR GENIE Results; TP53_p.H193R; B5101
LAPPQRLI

SEQ ID NO: 27957 - protein, 11 aa, Homo sapiens
  AACR GENIE Results; TP53_p.H193Y; A0201
GLAPPQYLIRV

SEQ ID NO: 27958 - protein, 9 aa, Homo sapiens
  AACR GENIE Results; TP53_p.H193Y; B1302
GLAPPQYLI

SEQ ID NO: 27959 - protein, 10 aa, Homo sapiens
  AACR GENIE Results; TP53_p.H193Y; A0101
DSDGLAPPQY

SEQ ID NO: 27960 - protein, 9 aa, Homo sapiens
  AACR GENIE Results; TP53_p.H193Y; A0201
GLAPPQYLI

SEQ ID NO: 27961 - protein, 9 aa, Homo sapiens
  AACR GENIE Results; TP53_p.H193Y; B1801
SDGLAPPQY

SEQ ID NO: 27962 - protein, 8 aa, Homo sapiens
  AACR GENIE Results; TP53_p.H193Y; B1801
DGLAPPQY

SEQ ID NO: 27963 - protein, 11 aa, Homo sapiens
  AACR GENIE Results; TP53_p.H193Y; A6802
GLAPPQYLIRV

SEQ ID NO: 27964 - protein, 8 aa, Homo sapiens
  AACR GENIE Results; TP53_p.H193Y; B3501
DGLAPPQY

SEQ ID NO: 27965 - protein, 8 aa, Homo sapiens
  AACR GENIE Results; TP53_p.H193Y; C1701
GLAPPQYL

SEQ ID NO: 27966 - protein, 8 aa, Homo sapiens
  AACR GENIE Results; TP53_p.H193Y; B5101
DGLAPPQY

SEQ ID NO: 27967 - protein, 11 aa, Homo sapiens
  AACR GENIE Results; TP53_p.H193Y; A3301
DGLAPPQYLIR

SEQ ID NO: 27968 - protein, 9 aa, Homo sapiens
  AACR GENIE Results; TP53_p.H193Y; B5101
APPQYLIRV

SEQ ID NO: 27969 - protein, 9 aa, Homo sapiens
  AACR GENIE Results; TP53_p.H193Y; B5101
LAPPQYLIR

SEQ ID NO: 27970 - protein, 9 aa, Homo sapiens
  AACR GENIE Results; TP53_p.H193Y; B4403
SDGLAPPQY

SEQ ID NO: 27971 - protein, 8 aa, Homo sapiens
  AACR GENIE Results; TP53_p.H193Y; B3901
DGLAPPQY

SEQ ID NO: 27972 - protein, 10 aa, Homo sapiens
  AACR GENIE Results; TP53_p.H214L; A0201
YLDDRNTFRL

SEQ ID NO: 27973 - protein, 11 aa, Homo sapiens
  AACR GENIE Results; TP53_p.H214L; A2402
EYLDDRNTFRL

SEQ ID NO: 27974 - protein, 10 aa, Homo sapiens
  AACR GENIE Results; TP53_p.H214Lfs*33; B0702
VPPSTTTTCV

SEQ ID NO: 27975 - protein, 9 aa, Homo sapiens
  AACR GENIE Results; TP53_p.H214R; A6802
NTFRRSVVV

SEQ ID NO: 27976 - protein, 11 aa, Homo sapiens
  AACR GENIE Results; TP53_p.H214R; A3303
EYLDDRNTFRR

SEQ ID NO: 27977 - protein, 9 aa, Homo sapiens
  AACR GENIE Results; TP53_p.H214R; B1402
DRNTFRRSV

SEQ ID NO: 27978 - protein, 9 aa, Homo sapiens
  AACR GENIE Results; TP53_p.I162Sfs*8; B1501
RAMASTSSH

SEQ ID NO: 27979 - protein, 10 aa, Homo sapiens
  AACR GENIE Results; TP53_p.I162Sfs*8; A0201
AMASTSSHST

SEQ ID NO: 27980 - protein, 9 aa, Homo sapiens
  AACR GENIE Results; TP53_p.I162Sfs*8; B0702
RAMASTSSH

SEQ ID NO: 27981 - protein, 9 aa, Homo sapiens
  AACR GENIE Results; TP53_p.I195F; B1501
GLAPPQHLF

SEQ ID NO: 27982 - protein, 11 aa, Homo sapiens
  AACR GENIE Results; TP53_p.I195F; A0201
GLAPPQHLFRV

SEQ ID NO: 27983 - protein, 10 aa, Homo sapiens
  AACR GENIE Results; TP53_p.I195F; A0301
GLAPPQHLFR

SEQ ID NO: 27984 - protein, 11 aa, Homo sapiens
  AACR GENIE Results; TP53_p.I195N; A0201
GLAPPQHLNRV

SEQ ID NO: 27985 - protein, 10 aa, Homo sapiens
  AACR GENIE Results; TP53_p.I195N; A3101
GLAPPQHLNR

SEQ ID NO: 27986 - protein, 10 aa, Homo sapiens
  AACR GENIE Results; TP53_p.I195N; A0301
GLAPPQHLNR

SEQ ID NO: 27987 - protein, 9 aa, Homo sapiens
  AACR GENIE Results; TP53_p.I195N; B5101
APPQHLNRV

SEQ ID NO: 27988 - protein, 8 aa, Homo sapiens
  AACR GENIE Results; TP53_p.I195N; B2705
NRVEGNLR

SEQ ID NO: 27989 - protein, 11 aa, Homo sapiens
  AACR GENIE Results; TP53_p.I195T; A3301
DGLAPPQHLTR

SEQ ID NO: 27990 - protein, 11 aa, Homo sapiens
  AACR GENIE Results; TP53_p.I195T; A0201
GLAPPQHLTRV

SEQ ID NO: 27991 - protein, 10 aa, Homo sapiens
  AACR GENIE Results; TP53_p.I195T; A0301
GLAPPQHLTR

SEQ ID NO: 27992 - protein, 9 aa, Homo sapiens
  AACR GENIE Results; TP53_p.I195T; B3901
TRVEGNLRV

SEQ ID NO: 27993 - protein, 11 aa, Homo sapiens
  AACR GENIE Results; TP53_p.I195T; A3303
DGLAPPQHLTR

SEQ ID NO: 27994 - protein, 9 aa, Homo sapiens
  AACR GENIE Results; TP53_p.I195T; B2705
TRVEGNLRV

SEQ ID NO: 27995 - protein, 11 aa, Homo sapiens
  AACR GENIE Results; TP53_p.I195T; B2702
TRVEGNLRVEY

SEQ ID NO: 27996 - protein, 10 aa, Homo sapiens
  AACR GENIE Results; TP53_p.I195T; A3101
GLAPPQHLTR

SEQ ID NO: 27997 - protein, 9 aa, Homo sapiens
  AACR GENIE Results; TP53_p.I195T; B5101
LAPPQHLTR

SEQ ID NO: 27998 - protein, 9 aa, Homo sapiens
  AACR GENIE Results; TP53_p.I195T; A3303
LTRVEGNLR

SEQ ID NO: 27999 - protein, 11 aa, Homo sapiens
  AACR GENIE Results; TP53_p.I195T; A6802
GLAPPQHLTRV

SEQ ID NO: 28000 - protein, 9 aa, Homo sapiens
  AACR GENIE Results; TP53_p.I195T; B0702
APPQHLTRV

SEQ ID NO: 28001 - protein, 8 aa, Homo sapiens
  AACR GENIE Results; TP53_p.I195T; B2705
TRVEGNLR

SEQ ID NO: 28002 - protein, 9 aa, Homo sapiens
  AACR GENIE Results; TP53_p.I195T; B5101
APPQHLTRV

SEQ ID NO: 28003 - protein, 10 aa, Homo sapiens
  AACR GENIE Results; TP53_p.I195T; A6801
GLAPPQHLTR

SEQ ID NO: 28004 - protein, 9 aa, Homo sapiens
  AACR GENIE Results; TP53_p.I195T; B1302
TRVEGNLRV

SEQ ID NO: 28005 - protein, 9 aa, Homo sapiens
  AACR GENIE Results; TP53_p.I195T; A0201
GLAPPQHLT

SEQ ID NO: 28006 - protein, 11 aa, Homo sapiens
  AACR GENIE Results; TP53_p.I195T; A6801
DGLAPPQHLTR

SEQ ID NO: 28007 - protein, 9 aa, Homo sapiens
  AACR GENIE Results; TP53_p.I232F; A0101
GSDCTTFHY

SEQ ID NO: 28008 - protein, 9 aa, Homo sapiens
  AACR GENIE Results; TP53_p.I232N; A0101
GSDCTTNHY

SEQ ID NO: 28009 - protein, 8 aa, Homo sapiens
  AACR GENIE Results; TP53_p.I232N; C1601
CTTNHYNY

SEQ ID NO: 28010 - protein, 9 aa, Homo sapiens
  AACR GENIE Results; TP53_p.I232N; A2601
CTTNHYNYM

SEQ ID NO: 28011 - protein, 9 aa, Homo sapiens
  AACR GENIE Results; TP53_p.I232T; A0101
GSDCTTTHY

SEQ ID NO: 28012 - protein, 8 aa, Homo sapiens
  AACR GENIE Results; TP53_p.I232T; C1601
CTTTHYNY

SEQ ID NO: 28013 - protein, 9 aa, Homo sapiens
  AACR GENIE Results; TP53_p.I251F; B0702
RPFLTIITL

SEQ ID NO: 28014 - protein, 9 aa, Homo sapiens
  AACR GENIE Results; TP53_p.I251F; C0602
NRRPFLTII

SEQ ID NO: 28015 - protein, 9 aa, Homo sapiens
  AACR GENIE Results; TP53_p.I251F; B3503
RPFLTIITL

SEQ ID NO: 28016 - protein, 9 aa, Homo sapiens
  AACR GENIE Results; TP53_p.I251F; B3501
RPFLTIITL

SEQ ID NO: 28017 - protein, 9 aa, Homo sapiens
  AACR GENIE Results; TP53_p.I251F; B5501
RPFLTIITL

SEQ ID NO: 28018 - protein, 9 aa, Homo sapiens
  AACR GENIE Results; TP53_p.I254N; B0702
RPILTNITL

SEQ ID NO: 28019 - protein, 9 aa, Homo sapiens
  AACR GENIE Results; TP53_p.I254N; C0602
NRRPILTNI

SEQ ID NO: 28020 - protein, 9 aa, Homo sapiens
  AACR GENIE Results; TP53_p.I254N; B3501
RPILTNITL

SEQ ID NO: 28021 - protein, 9 aa, Homo sapiens
  AACR GENIE Results; TP53_p.I255del; C0602
RRPILTITL

SEQ ID NO: 28022 - protein, 8 aa, Homo sapiens
  AACR GENIE Results; TP53_p.I255del; B0702
RPILTITL

SEQ ID NO: 28023 - protein, 9 aa, Homo sapiens
  AACR GENIE Results; TP53_p.I255del; C0702
RRPILTITL

SEQ ID NO: 28024 - protein, 9 aa, Homo sapiens
  AACR GENIE Results; TP53_p.I255del; C0701
RRPILTITL

SEQ ID NO: 28025 - protein, 11 aa, Homo sapiens
  AACR GENIE Results; TP53_p.I255F; A0205
FTLEDSSGNLL

SEQ ID NO: 28026 - protein, 9 aa, Homo sapiens
  AACR GENIE Results; TP53_p.I255F; C0702
NRRPILTIF

SEQ ID NO: 28027 - protein, 9 aa, Homo sapiens
  AACR GENIE Results; TP53_p.I255F; C0602
NRRPILTIF

SEQ ID NO: 28028 - protein, 9 aa, Homo sapiens
  AACR GENIE Results; TP53_p.I255F; B0702
RPILTIFTL

SEQ ID NO: 28029 - protein, 11 aa, Homo sapiens
  AACR GENIE Results; TP53_p.I255F; B3801
FTLEDSSGNLL

SEQ ID NO: 28030 - protein, 11 aa, Homo sapiens
  AACR GENIE Results; TP53_p.I255F; A6802
FTLEDSSGNLL

SEQ ID NO: 28031 - protein, 11 aa, Homo sapiens
  AACR GENIE Results; TP53_p.I255F; C0304
FTLEDSSGNLL

SEQ ID NO: 28032 - protein, 11 aa, Homo sapiens
  AACR GENIE Results; TP53_p.I255F; B5001
FTLEDSSGNLL

SEQ ID NO: 28033 - protein, 11 aa, Homo sapiens
  AACR GENIE Results; TP53_p.I255F; A0201
FTLEDSSGNLL

SEQ ID NO: 28034 - protein, 11 aa, Homo sapiens
  AACR GENIE Results; TP53_p.I255F; B3503
FTLEDSSGNLL

SEQ ID NO: 28035 - protein, 11 aa, Homo sapiens
  AACR GENIE Results; TP53_p.I255F; C0303
FTLEDSSGNLL

SEQ ID NO: 28036 - protein, 9 aa, Homo sapiens
  AACR GENIE Results; TP53_p.I255F; B3503
RPILTIFTL

SEQ ID NO: 28037 - protein, 10 aa, Homo sapiens
  AACR GENIE Results; TP53_p.I255F; A6802
FTLEDSSGNL

SEQ ID NO: 28038 - protein, 9 aa, Homo sapiens
  AACR GENIE Results; TP53_p.I255S; B0702
RPILTISTL

SEQ ID NO: 28039 - protein, 9 aa, Homo sapiens
  AACR GENIE Results; TP53_p.I255S; B3501
RPILTISTL

SEQ ID NO: 28040 - protein, 9 aa, Homo sapiens
  AACR GENIE Results; TP53_p.I255S; B0801
RPILTISTL

SEQ ID NO: 28041 - protein, 9 aa, Homo sapiens
  AACR GENIE Results; TP53_p.K120E; B3501
TAESVTCTY

SEQ ID NO: 28042 - protein, 10 aa, Homo sapiens
  AACR GENIE Results; TP53_p.K120E; B1501
GTAESVTCTY

SEQ ID NO: 28043 - protein, 10 aa, Homo sapiens
  AACR GENIE Results; TP53_p.K120E; A2902
GTAESVTCTY

SEQ ID NO: 28044 - protein, 9 aa, Homo sapiens
  AACR GENIE Results; TP53_p.K120E; B5801
TAESVTCTY

SEQ ID NO: 28045 - protein, 10 aa, Homo sapiens
  AACR GENIE Results; TP53_p.K120E; A2601
GTAESVTCTY

SEQ ID NO: 28046 - protein, 9 aa, Homo sapiens
  AACR GENIE Results; TP53_p.K120E; B1501
TAESVTCTY

SEQ ID NO: 28047 - protein, 8 aa, Homo sapiens
  AACR GENIE Results; TP53_p.K120E; B3701
AESVTCTY

SEQ ID NO: 28048 - protein, 9 aa, Homo sapiens
  AACR GENIE Results; TP53_p.K120E; A0101
TAESVTCTY

SEQ ID NO: 28049 - protein, 10 aa, Homo sapiens
  AACR GENIE Results; TP53_p.K120E; B5801
GTAESVTCTY

SEQ ID NO: 28050 - protein, 8 aa, Homo sapiens
  AACR GENIE Results; TP53_p.K120E; B1801
AESVTCTY

SEQ ID NO: 28051 - protein, 9 aa, Homo sapiens
  AACR GENIE Results; TP53_p.K120E; B3901
TAESVTCTY

SEQ ID NO: 28052 - protein, 10 aa, Homo sapiens
  AACR GENIE Results; TP53_p.K120E; A1101
GTAESVTCTY

SEQ ID NO: 28053 - protein, 10 aa, Homo sapiens
  AACR GENIE Results; TP53_p.K120E; A0101
GTAESVTCTY

SEQ ID NO: 28054 - protein, 8 aa, Homo sapiens
  AACR GENIE Results; TP53_p.K120E; B4403
AESVTCTY

SEQ ID NO: 28055 - protein, 10 aa, Homo sapiens
  AACR GENIE Results; TP53_p.K120E; B1302
FLHSGTAESV

SEQ ID NO: 28056 - protein, 10 aa, Homo sapiens
  AACR GENIE Results; TP53_p.K120E; A0301
GTAESVTCTY

SEQ ID NO: 28057 - protein, 10 aa, Homo sapiens
  AACR GENIE Results; TP53_p.K120E; A3201
GTAESVTCTY

SEQ ID NO: 28058 - protein, 10 aa, Homo sapiens
  AACR GENIE Results; TP53_p.K120E; B5701
GTAESVTCTY

SEQ ID NO: 28059 - protein, 8 aa, Homo sapiens
  AACR GENIE Results; TP53_p.K120E; B4402
AESVTCTY

SEQ ID NO: 28060 - protein, 10 aa, Homo sapiens
  AACR GENIE Results; TP53_p.K120E; A6801
GTAESVTCTY

SEQ ID NO: 28061 - protein, 10 aa, Homo sapiens
  AACR GENIE Results; TP53_p.K120E; A0201
FLHSGTAESV

SEQ ID NO: 28062 - protein, 9 aa, Homo sapiens
  AACR GENIE Results; TP53_p.K120E; B3901
LHSGTAESV

SEQ ID NO: 28063 - protein, 9 aa, Homo sapiens
  AACR GENIE Results; TP53_p.K120E; B3801
LHSGTAESV

SEQ ID NO: 28064 - protein, 10 aa, Homo sapiens
  AACR GENIE Results; TP53_p.K120E; B2702
GTAESVTCTY

SEQ ID NO: 28065 - protein, 10 aa, Homo sapiens
  AACR GENIE Results; TP53_p.K120E; B3501
GTAESVTCTY

SEQ ID NO: 28066 - protein, 9 aa, Homo sapiens
  AACR GENIE Results; TP53_p.K120E; A0201
FLHSGTAES

SEQ ID NO: 28067 - protein, 10 aa, Homo sapiens
  AACR GENIE Results; TP53_p.K120E; B4403
GTAESVTCTY

SEQ ID NO: 28068 - protein, 9 aa, Homo sapiens
  AACR GENIE Results; TP53_p.K120E; A2601
TAESVTCTY

SEQ ID NO: 28069 - protein, 8 aa, Homo sapiens
  AACR GENIE Results; TP53_p.K120E; B1501
AESVTCTY

SEQ ID NO: 28070 - protein, 9 aa, Homo sapiens
  AACR GENIE Results; TP53_p.K120E; A3001
TAESVTCTY

SEQ ID NO: 28071 - protein, 10 aa, Homo sapiens
  AACR GENIE Results; TP53_p.K120E; B2705
GTAESVTCTY

SEQ ID NO: 28072 - protein, 9 aa, Homo sapiens
  AACR GENIE Results; TP53_p.K120E; B4901
AESVTCTYS

SEQ ID NO: 28073 - protein, 11 aa, Homo sapiens
  AACR GENIE Results; TP53_p.K120E; B5701
SGTAESVTCTY

SEQ ID NO: 28074 - protein, 9 aa, Homo sapiens
  AACR GENIE Results; TP53_p.K120E; B5701
TAESVTCTY

SEQ ID NO: 28075 - protein, 9 aa, Homo sapiens
  AACR GENIE Results; TP53_p.K120E; B1801
TAESVTCTY

SEQ ID NO: 28076 - protein, 9 aa, Homo sapiens
  AACR GENIE Results; TP53_p.K120E; A6801
TAESVTCTY

SEQ ID NO: 28077 - protein, 10 aa, Homo sapiens
  AACR GENIE Results; TP53_p.K120E; A6802
FLHSGTAESV

SEQ ID NO: 28078 - protein, 8 aa, Homo sapiens
  AACR GENIE Results; TP53_p.K120E; B5801
AESVTCTY

SEQ ID NO: 28079 - protein, 9 aa, Homo sapiens
  AACR GENIE Results; TP53_p.K120E; B3503
TAESVTCTY

SEQ ID NO: 28080 - protein, 9 aa, Homo sapiens
  AACR GENIE Results; TP53_p.K120E; C0202
TAESVTCTY

SEQ ID NO: 28081 - protein, 9 aa, Homo sapiens
  AACR GENIE Results; TP53_p.K120E; A2902
TAESVTCTY

SEQ ID NO: 28082 - protein, 10 aa, Homo sapiens
  AACR GENIE Results; TP53_p.K120E; A3101
GTAESVTCTY

SEQ ID NO: 28083 - protein, 9 aa, Homo sapiens
  AACR GENIE Results; TP53_p.K120E; B3801
TAESVTCTY

SEQ ID NO: 28084 - protein, 10 aa, Homo sapiens
  AACR GENIE Results; TP53_p.K132E; A2402
TYSPALNEMF

SEQ ID NO: 28085 - protein, 10 aa, Homo sapiens
  AACR GENIE Results; TP53_p.K132E; A2301
TYSPALNEMF

SEQ ID NO: 28086 - protein, 9 aa, Homo sapiens
  AACR GENIE Results; TP53_p.K132E; A2402
TYSPALNEM

SEQ ID NO: 28087 - protein, 9 aa, Homo sapiens
  AACR GENIE Results; TP53_p.K132E; A2301
TYSPALNEM

SEQ ID NO: 28088 - protein, 8 aa, Homo sapiens
  AACR GENIE Results; TP53_p.K132E; C0102
YSPALNEM

SEQ ID NO: 28089 - protein, 9 aa, Homo sapiens
  AACR GENIE Results; TP53_p.K132E; C0702
TYSPALNEM

SEQ ID NO: 28090 - protein, 9 aa, Homo sapiens
  AACR GENIE Results; TP53_p.K132E; A0201
ALNEMFCQL

SEQ ID NO: 28091 - protein, 9 aa, Homo sapiens
  AACR GENIE Results; TP53_p.K132E; B3801
TYSPALNEM

SEQ ID NO: 28092 - protein, 8 aa, Homo sapiens
  AACR GENIE Results; TP53_p.K132E; B3501
SPALNEMF

SEQ ID NO: 28093 - protein, 9 aa, Homo sapiens
  AACR GENIE Results; TP53_p.K132E; B3501
TYSPALNEM

SEQ ID NO: 28094 - protein, 10 aa, Homo sapiens
  AACR GENIE Results; TP53_p.K132E; B3801
TYSPALNEMF

SEQ ID NO: 28095 - protein, 9 aa, Homo sapiens
  AACR GENIE Results; TP53_p.K132E; C0602
TYSPALNEM

SEQ ID NO: 28096 - protein, 10 aa, Homo sapiens
  AACR GENIE Results; TP53_p.K132N; A2402
TYSPALNNMF

SEQ ID NO: 28097 - protein, 10 aa, Homo sapiens
  AACR GENIE Results; TP53_p.K132N; A2301
TYSPALNNMF

SEQ ID NO: 28098 - protein, 9 aa, Homo sapiens
  AACR GENIE Results; TP53_p.K132N; A2402
TYSPALNNM

SEQ ID NO: 28099 - protein, 9 aa, Homo sapiens
  AACR GENIE Results; TP53_p.K132N; C1402
TYSPALNNM

SEQ ID NO: 28100 - protein, 9 aa, Homo sapiens
  AACR GENIE Results; TP53_p.K132N; A2301
TYSPALNNM

SEQ ID NO: 28101 - protein, 10 aa, Homo sapiens
  AACR GENIE Results; TP53_p.K132N; C1402
TYSPALNNMF

SEQ ID NO: 28102 - protein, 8 aa, Homo sapiens
  AACR GENIE Results; TP53_p.K132N; B0702
SPALNNMF

SEQ ID NO: 28103 - protein, 9 aa, Homo sapiens
  AACR GENIE Results; TP53_p.K132N; B3901
TYSPALNNM

SEQ ID NO: 28104 - protein, 8 aa, Homo sapiens
  AACR GENIE Results; TP53_p.K132N; B3501
SPALNNMF

SEQ ID NO: 28105 - protein, 10 aa, Homo sapiens
  AACR GENIE Results; TP53_p.K132N; B5801
TYSPALNNMF

SEQ ID NO: 28106 - protein, 10 aa, Homo sapiens
  AACR GENIE Results; TP53_p.K132N; B3801
TYSPALNNMF

SEQ ID NO: 28107 - protein, 9 aa, Homo sapiens
  AACR GENIE Results; TP53_p.K132N; A2402
YSPALNNMF

SEQ ID NO: 28108 - protein, 8 aa, Homo sapiens
  AACR GENIE Results; TP53_p.K132N; C0102
YSPALNNM

SEQ ID NO: 28109 - protein, 10 aa, Homo sapiens
  AACR GENIE Results; TP53_p.K132N; B5701
TYSPALNNMF

SEQ ID NO: 28110 - protein, 9 aa, Homo sapiens
  AACR GENIE Results; TP53_p.K132N; C0102
YSPALNNMF

SEQ ID NO: 28111 - protein, 9 aa, Homo sapiens
  AACR GENIE Results; TP53_p.K132N; B3801
TYSPALNNM

SEQ ID NO: 28112 - protein, 9 aa, Homo sapiens
  AACR GENIE Results; TP53_p.K132R; A1101
CTYSPALNR

SEQ ID NO: 28113 - protein, 9 aa, Homo sapiens
  AACR GENIE Results; TP53_p.K132R; A3303
CTYSPALNR

SEQ ID NO: 28114 - protein, 10 aa, Homo sapiens
  AACR GENIE Results; TP53_p.K132R; A2402
TYSPALNRMF

SEQ ID NO: 28115 - protein, 9 aa, Homo sapiens
  AACR GENIE Results; TP53_p.K132R; A0301
CTYSPALNR

SEQ ID NO: 28116 - protein, 9 aa, Homo sapiens
  AACR GENIE Results; TP53_p.K132R; A3101
CTYSPALNR

SEQ ID NO: 28117 - protein, 10 aa, Homo sapiens
  AACR GENIE Results; TP53_p.K132R; A2301
TYSPALNRMF

SEQ ID NO: 28118 - protein, 9 aa, Homo sapiens
  AACR GENIE Results; TP53_p.K132R; A2402
TYSPALNRM

SEQ ID NO: 28119 - protein, 9 aa, Homo sapiens
  AACR GENIE Results; TP53_p.K132R; A3301
CTYSPALNR

SEQ ID NO: 28120 - protein, 9 aa, Homo sapiens
  AACR GENIE Results; TP53_p.K132R; A6801
CTYSPALNR

SEQ ID NO: 28121 - protein, 8 aa, Homo sapiens
  AACR GENIE Results; TP53_p.K132R; A3303
TYSPALNR

SEQ ID NO: 28122 - protein, 9 aa, Homo sapiens
  AACR GENIE Results; TP53_p.K132R; C1402
TYSPALNRM

SEQ ID NO: 28123 - protein, 9 aa, Homo sapiens
  AACR GENIE Results; TP53_p.K132R; A2301
TYSPALNRM

SEQ ID NO: 28124 - protein, 10 aa, Homo sapiens
  AACR GENIE Results; TP53_p.K132R; C1402
TYSPALNRMF

SEQ ID NO: 28125 - protein, 10 aa, Homo sapiens
  AACR GENIE Results; TP53_p.K132R; B5701
TYSPALNRMF

SEQ ID NO: 28126 - protein, 10 aa, Homo sapiens
  AACR GENIE Results; TP53_p.K132R; A6801
TCTYSPALNR

SEQ ID NO: 28127 - protein, 9 aa, Homo sapiens
  AACR GENIE Results; TP53_p.K132R; A3303
TYSPALNRM

SEQ ID NO: 28128 - protein, 8 aa, Homo sapiens
  AACR GENIE Results; TP53_p.K132R; A3101
TYSPALNR

SEQ ID NO: 28129 - protein, 8 aa, Homo sapiens
  AACR GENIE Results; TP53_p.K132R; B0702
SPALNRMF

SEQ ID NO: 28130 - protein, 8 aa, Homo sapiens
  AACR GENIE Results; TP53_p.K132R; A3301
TYSPALNR

SEQ ID NO: 28131 - protein, 9 aa, Homo sapiens
  AACR GENIE Results; TP53_p.K132R; B3901
TYSPALNRM

SEQ ID NO: 28132 - protein, 10 aa, Homo sapiens
  AACR GENIE Results; TP53_p.K132R; A3303
TCTYSPALNR

SEQ ID NO: 28133 - protein, 9 aa, Homo sapiens
  AACR GENIE Results; TP53_p.K132R; C0602
TYSPALNRM

SEQ ID NO: 28134 - protein, 9 aa, Homo sapiens
  AACR GENIE Results; TP53_p.K132R; B5701
YSPALNRMF

SEQ ID NO: 28135 - protein, 9 aa, Homo sapiens
  AACR GENIE Results; TP53_p.K139Rfs*31; B0702
APWPSTSSH

SEQ ID NO: 28136 - protein, 9 aa, Homo sapiens
  AACR GENIE Results; TP53_p.K139Rfs*31; B0702
HPRPAPASA

SEQ ID NO: 28137 - protein, 9 aa, Homo sapiens
  AACR GENIE Results; TP53_p.K139Rfs*31; B0801
IPHPRPAPA

SEQ ID NO: 28138 - protein, 9 aa, Homo sapiens
  AACR GENIE Results; TP53_p.K139Rfs*31; A0201
GLIPHPRPA

SEQ ID NO: 28139 - protein, 10 aa, Homo sapiens
  AACR GENIE Results; TP53_p.K139Rfs*31; A0201
LIPHPRPAPA

SEQ ID NO: 28140 - protein, 9 aa, Homo sapiens
  AACR GENIE Results; TP53_p.K139Rfs*31; B3501
APWPSTSSH

SEQ ID NO: 28141 - protein, 9 aa, Homo sapiens
  AACR GENIE Results; TP53_p.K139Rfs*31; B0702
IPHPRPAPA

SEQ ID NO: 28142 - protein, 8 aa, Homo sapiens
  AACR GENIE Results; TP53_p.K139Rfs*31; B0702
IPHPRPAP

SEQ ID NO: 28143 - protein, 9 aa, Homo sapiens
  AACR GENIE Results; TP53_p.K139Rfs*31; A0201
IPHPRPAPA

SEQ ID NO: 28144 - protein, 11 aa, Homo sapiens
  AACR GENIE Results; TP53_p.K139Rfs*31; B3501
APWPSTSSHST

SEQ ID NO: 28145 - protein, 9 aa, Homo sapiens
  AACR GENIE Results; TP53_p.K164E; B1501
AIYEQSQHM

SEQ ID NO: 28146 - protein, 10 aa, Homo sapiens
  AACR GENIE Results; TP53_p.K164E; B3501
MAIYEQSQHM

SEQ ID NO: 28147 - protein, 9 aa, Homo sapiens
  AACR GENIE Results; TP53_p.K164E; A0201
AIYEQSQHM

SEQ ID NO: 28148 - protein, 9 aa, Homo sapiens
  AACR GENIE Results; TP53_p.K164E; C0304
AIYEQSQHM

SEQ ID NO: 28149 - protein, 9 aa, Homo sapiens
  AACR GENIE Results; TP53_p.K164E; A0301
AIYEQSQHM

SEQ ID NO: 28150 - protein, 9 aa, Homo sapiens
  AACR GENIE Results; TP53_p.K164E; C0303
AIYEQSQHM

SEQ ID NO: 28151 - protein, 9 aa, Homo sapiens
  AACR GENIE Results; TP53_p.K164E; A2601
AIYEQSQHM

SEQ ID NO: 28152 - protein, 8 aa, Homo sapiens
  AACR GENIE Results; TP53_p.K164E; C0401
IYEQSQHM

SEQ ID NO: 28153 - protein, 9 aa, Homo sapiens
  AACR GENIE Results; TP53_p.K164E; C0202
AIYEQSQHM

SEQ ID NO: 28154 - protein, 9 aa, Homo sapiens
  AACR GENIE Results; TP53_p.K164E; B3501
MAIYEQSQH

SEQ ID NO: 28155 - protein, 9 aa, Homo sapiens
  AACR GENIE Results; TP53_p.K164E; A1101
AIYEQSQHM

SEQ ID NO: 28156 - protein, 9 aa, Homo sapiens
  AACR GENIE Results; TP53_p.L111P; B5701
GSYGFRPGF

SEQ ID NO: 28157 - protein, 9 aa, Homo sapiens
  AACR GENIE Results; TP53_p.L111P; C1402
SYGFRPGFL

SEQ ID NO: 28158 - protein, 8 aa, Homo sapiens
  AACR GENIE Results; TP53_p.L111P; C1402
SYGFRPGF

SEQ ID NO: 28159 - protein, 10 aa, Homo sapiens
  AACR GENIE Results; TP53_p.L111P; C1701
GSYGFRPGFL

SEQ ID NO: 28160 - protein, 9 aa, Homo sapiens
  AACR GENIE Results; TP53_p.L130F; A1101
CTYSPAFNK

SEQ ID NO: 28161 - protein, 9 aa, Homo sapiens
  AACR GENIE Results; TP53_p.L130F; A0301
CTYSPAFNK

SEQ ID NO: 28162 - protein, 9 aa, Homo sapiens
  AACR GENIE Results; TP53_p.L130F; A2402
TYSPAFNKM

SEQ ID NO: 28163 - protein, 10 aa, Homo sapiens
  AACR GENIE Results; TP53_p.L130F; A2402
TYSPAFNKMF

SEQ ID NO: 28164 - protein, 10 aa, Homo sapiens
  AACR GENIE Results; TP53_p.L130F; A2301
TYSPAFNKMF

SEQ ID NO: 28165 - protein, 9 aa, Homo sapiens
  AACR GENIE Results; TP53_p.L130F; A2301
TYSPAFNKM

SEQ ID NO: 28166 - protein, 9 aa, Homo sapiens
  AACR GENIE Results; TP53_p.L130F; C1402
TYSPAFNKM

SEQ ID NO: 28167 - protein, 8 aa, Homo sapiens
  AACR GENIE Results; TP53_p.L130F; A3303
TYSPAFNK

SEQ ID NO: 28168 - protein, 9 aa, Homo sapiens
  AACR GENIE Results; TP53_p.L130F; C0102
YSPAFNKMF

SEQ ID NO: 28169 - protein, 10 aa, Homo sapiens
  AACR GENIE Results; TP53_p.L130F; C1402
TYSPAFNKMF

SEQ ID NO: 28170 - protein, 9 aa, Homo sapiens
  AACR GENIE Results; TP53_p.L130F; C0202
YSPAFNKMF

SEQ ID NO: 28171 - protein, 10 aa, Homo sapiens
  AACR GENIE Results; TP53_p.L130F; A1101
TCTYSPAFNK

SEQ ID NO: 28172 - protein, 8 aa, Homo sapiens
  AACR GENIE Results; TP53_p.L130F; B0702
SPAFNKMF

SEQ ID NO: 28173 - protein, 9 aa, Homo sapiens
  AACR GENIE Results; TP53_p.L130F; C1203
YSPAFNKMF

SEQ ID NO: 28174 - protein, 10 aa, Homo sapiens
  AACR GENIE Results; TP53_p.L130F; B5701
TYSPAFNKMF

SEQ ID NO: 28175 - protein, 9 aa, Homo sapiens
  AACR GENIE Results; TP53_p.L130F; C0602
YSPAFNKMF

SEQ ID NO: 28176 - protein, 9 aa, Homo sapiens
  AACR GENIE Results; TP53_p.L130F; C1601
YSPAFNKMF

SEQ ID NO: 28177 - protein, 9 aa, Homo sapiens
  AACR GENIE Results; TP53_p.L130F; A3303
TYSPAFNKM

SEQ ID NO: 28178 - protein, 9 aa, Homo sapiens
  AACR GENIE Results; TP53_p.L130R; A0301
CTYSPARNK

SEQ ID NO: 28179 - protein, 9 aa, Homo sapiens
  AACR GENIE Results; TP53_p.L130R; A1101
CTYSPARNK

SEQ ID NO: 28180 - protein, 9 aa, Homo sapiens
  AACR GENIE Results; TP53_p.L130R; A2402
TYSPARNKM

SEQ ID NO: 28181 - protein, 10 aa, Homo sapiens
  AACR GENIE Results; TP53_p.L130R; A2301
TYSPARNKMF

SEQ ID NO: 28182 - protein, 10 aa, Homo sapiens
  AACR GENIE Results; TP53_p.L130R; A2402
TYSPARNKMF

SEQ ID NO: 28183 - protein, 10 aa, Homo sapiens
  AACR GENIE Results; TP53_p.L130R; A0301
TCTYSPARNK

SEQ ID NO: 28184 - protein, 8 aa, Homo sapiens
  AACR GENIE Results; TP53_p.L130R; B0702
SPARNKMF

SEQ ID NO: 28185 - protein, 10 aa, Homo sapiens
  AACR GENIE Results; TP53_p.L130R; A1101
TCTYSPARNK

SEQ ID NO: 28186 - protein, 9 aa, Homo sapiens
  AACR GENIE Results; TP53_p.L130R; C0102
YSPARNKMF

SEQ ID NO: 28187 - protein, 9 aa, Homo sapiens
  AACR GENIE Results; TP53_p.L130V; A1101
CTYSPAVNK

SEQ ID NO: 28188 - protein, 9 aa, Homo sapiens
  AACR GENIE Results; TP53_p.L130V; A0301
CTYSPAVNK

SEQ ID NO: 28189 - protein, 10 aa, Homo sapiens
  AACR GENIE Results; TP53_p.L130V; A2402
TYSPAVNKMF

SEQ ID NO: 28190 - protein, 10 aa, Homo sapiens
  AACR GENIE Results; TP53_p.L130V; A2301
TYSPAVNKMF

SEQ ID NO: 28191 - protein, 9 aa, Homo sapiens
  AACR GENIE Results; TP53_p.L130V; A2402
TYSPAVNKM

SEQ ID NO: 28192 - protein, 9 aa, Homo sapiens
  AACR GENIE Results; TP53_p.L130V; C1402
TYSPAVNKM

SEQ ID NO: 28193 - protein, 9 aa, Homo sapiens
  AACR GENIE Results; TP53_p.L130V; A2301
TYSPAVNKM

SEQ ID NO: 28194 - protein, 9 aa, Homo sapiens
  AACR GENIE Results; TP53_p.L130V; B3901
TYSPAVNKM

SEQ ID NO: 28195 - protein, 9 aa, Homo sapiens
  AACR GENIE Results; TP53_p.L130V; A6801
CTYSPAVNK

SEQ ID NO: 28196 - protein, 9 aa, Homo sapiens
  AACR GENIE Results; TP53_p.L130V; A3303
CTYSPAVNK

SEQ ID NO: 28197 - protein, 8 aa, Homo sapiens
  AACR GENIE Results; TP53_p.L130V; B0702
SPAVNKMF

SEQ ID NO: 28198 - protein, 8 aa, Homo sapiens
  AACR GENIE Results; TP53_p.L130V; A3303
TYSPAVNK

SEQ ID NO: 28199 - protein, 9 aa, Homo sapiens
  AACR GENIE Results; TP53_p.L130V; B0702
TYSPAVNKM

SEQ ID NO: 28200 - protein, 10 aa, Homo sapiens
  AACR GENIE Results; TP53_p.L130V; A1101
TCTYSPAVNK

SEQ ID NO: 28201 - protein, 10 aa, Homo sapiens
  AACR GENIE Results; TP53_p.L130V; B5701
TYSPAVNKMF

SEQ ID NO: 28202 - protein, 8 aa, Homo sapiens
  AACR GENIE Results; TP53_p.L130V; A1101
TYSPAVNK

SEQ ID NO: 28203 - protein, 9 aa, Homo sapiens
  AACR GENIE Results; TP53_p.L130V; C0202
YSPAVNKMF

SEQ ID NO: 28204 - protein, 9 aa, Homo sapiens
  AACR GENIE Results; TP53_p.L130V; C0702
TYSPAVNKM

SEQ ID NO: 28205 - protein, 8 aa, Homo sapiens
  AACR GENIE Results; TP53_p.L130V; B5101
YSPAVNKM

SEQ ID NO: 28206 - protein, 9 aa, Homo sapiens
  AACR GENIE Results; TP53_p.L130V; A3303
TYSPAVNKM

SEQ ID NO: 28207 - protein, 9 aa, Homo sapiens
  AACR GENIE Results; TP53_p.L130V; B5701
YSPAVNKMF

SEQ ID NO: 28208 - protein, 10 aa, Homo sapiens
  AACR GENIE Results; TP53_p.L130V; A0301
TCTYSPAVNK

SEQ ID NO: 28209 - protein, 9 aa, Homo sapiens
  AACR GENIE Results; TP53_p.L130V; B3801
TYSPAVNKM

SEQ ID NO: 28210 - protein, 10 aa, Homo sapiens
  AACR GENIE Results; TP53_p.L130V; C1402
TYSPAVNKMF

SEQ ID NO: 28211 - protein, 9 aa, Homo sapiens
  AACR GENIE Results; TP53_p.L130V; B3501
TYSPAVNKM

SEQ ID NO: 28212 - protein, 9 aa, Homo sapiens
  AACR GENIE Results; TP53_p.L130V; A3101
CTYSPAVNK

SEQ ID NO: 28213 - protein, 8 aa, Homo sapiens
  AACR GENIE Results; TP53_p.L130V; C0102
YSPAVNKM

SEQ ID NO: 28214 - protein, 9 aa, Homo sapiens
  AACR GENIE Results; TP53_p.L130V; C0102
YSPAVNKMF

SEQ ID NO: 28215 - protein, 8 aa, Homo sapiens
  AACR GENIE Results; TP53_p.L130V; B3501
SPAVNKMF

SEQ ID NO: 28216 - protein, 10 aa, Homo sapiens
  AACR GENIE Results; TP53_p.L130V; A0301
CTYSPAVNKM

SEQ ID NO: 28217 - protein, 10 aa, Homo sapiens
  AACR GENIE Results; TP53_p.L130V; A1101
CTYSPAVNKM

SEQ ID NO: 28218 - protein, 9 aa, Homo sapiens
  AACR GENIE Results; TP53_p.L130V; A2301
YSPAVNKMF

SEQ ID NO: 28219 - protein, 8 aa, Homo sapiens
  AACR GENIE Results; TP53_p.L130V; B0801
SPAVNKMF

SEQ ID NO: 28220 - protein, 8 aa, Homo sapiens
  AACR GENIE Results; TP53_p.L145R; B5701
KTCPVQRW

SEQ ID NO: 28221 - protein, 9 aa, Homo sapiens
  AACR GENIE Results; TP53_p.L194F; A0201
GLAPPQHFI

SEQ ID NO: 28222 - protein, 11 aa, Homo sapiens
  AACR GENIE Results; TP53_p.L194F; A0201
GLAPPQHFIRV

SEQ ID NO: 28223 - protein, 10 aa, Homo sapiens
  AACR GENIE Results; TP53_p.L194F; B5101
DGLAPPQHFI

SEQ ID NO: 28224 - protein, 9 aa, Homo sapiens
  AACR GENIE Results; TP53_p.L194F; B5101
APPQHFIRV

SEQ ID NO: 28225 - protein, 9 aa, Homo sapiens
  AACR GENIE Results; TP53_p.L194R; B1302
GLAPPQHRI

SEQ ID NO: 28226 - protein, 9 aa, Homo sapiens
  AACR GENIE Results; TP53_p.L194R; A3303
DGLAPPQHR

SEQ ID NO: 28227 - protein, 10 aa, Homo sapiens
  AACR GENIE Results; TP53_p.L194R; B5101
DGLAPPQHRI

SEQ ID NO: 28228 - protein, 9 aa, Homo sapiens
  AACR GENIE Results; TP53_p.L194R; A0201
GLAPPQHRI

SEQ ID NO: 28229 - protein, 11 aa, Homo sapiens
  AACR GENIE Results; TP53_p.L194R; A6801
DSDGLAPPQHR

SEQ ID NO: 28230 - protein, 11 aa, Homo sapiens
  AACR GENIE Results; TP53_p.L194R; A3303
DSDGLAPPQHR

SEQ ID NO: 28231 - protein, 9 aa, Homo sapiens
  AACR GENIE Results; TP53_p.L194R; B3801
GLAPPQHRI

SEQ ID NO: 28232 - protein, 9 aa, Homo sapiens
  AACR GENIE Results; TP53_p.L257P; B4001
PEDSSGNLL

SEQ ID NO: 28233 - protein, 10 aa, Homo sapiens
  AACR GENIE Results; TP53_p.L257P; B3501
TPEDSSGNLL

SEQ ID NO: 28234 - protein, 9 aa, Homo sapiens
  AACR GENIE Results; TP53_p.L257P; C0802
TPEDSSGNL

SEQ ID NO: 28235 - protein, 9 aa, Homo sapiens
  AACR GENIE Results; TP53_p.L265P; A6801
DSSGNLPGR

SEQ ID NO: 28236 - protein, 10 aa, Homo sapiens
  AACR GENIE Results; TP53_p.L265P; A6801
EDSSGNLPGR

SEQ ID NO: 28237 - protein, 10 aa, Homo sapiens
  AACR GENIE Results; TP53_p.L265P; B0702
SGNLPGRNSF

SEQ ID NO: 28238 - protein, 10 aa, Homo sapiens
  AACR GENIE Results; TP53_p.L265P; B1501
SGNLPGRNSF

SEQ ID NO: 28239 - protein, 9 aa, Homo sapiens
  AACR GENIE Results; TP53_p.L330P; B5101
DGEYFTPQI

SEQ ID NO: 28240 - protein, 8 aa, Homo sapiens
  AACR GENIE Results; TP53_p.L330P; B1801
GEYFTPQI

SEQ ID NO: 28241 - protein, 9 aa, Homo sapiens
  AACR GENIE Results; TP53_p.L344R; B0702
RERNEALEL

SEQ ID NO: 28242 - protein, 9 aa, Homo sapiens
  AACR GENIE Results; TP53_p.L348F; B4001
RELNEAFEL

SEQ ID NO: 28243 - protein, 9 aa, Homo sapiens
  AACR GENIE Results; TP53_p.L348F; A1101
ELNEAFELK

SEQ ID NO: 28244 - protein, 9 aa, Homo sapiens
  AACR GENIE Results; TP53_p.L348F; B4403
RELNEAFEL

SEQ ID NO: 28245 - protein, 10 aa, Homo sapiens
  AACR GENIE Results; TP53_p.M133T; A2402
TYSPALNKTF

SEQ ID NO: 28246 - protein, 10 aa, Homo sapiens
  AACR GENIE Results; TP53_p.M133T; A2301
TYSPALNKTF

SEQ ID NO: 28247 - protein, 8 aa, Homo sapiens
  AACR GENIE Results; TP53_p.M133T; B0702
SPALNKTF

SEQ ID NO: 28248 - protein, 11 aa, Homo sapiens
  AACR GENIE Results; TP53_p.M133T; B0702
SPALNKTFCQL

SEQ ID NO: 28249 - protein, 8 aa, Homo sapiens
  AACR GENIE Results; TP53_p.M133T; B3501
SPALNKTF

SEQ ID NO: 28250 - protein, 10 aa, Homo sapiens
  AACR GENIE Results; TP53_p.M133T; B5701
TYSPALNKTF

SEQ ID NO: 28251 - protein, 9 aa, Homo sapiens
  AACR GENIE Results; TP53_p.M133T; C0102
YSPALNKTF

SEQ ID NO: 28252 - protein, 9 aa, Homo sapiens
  AACR GENIE Results; TP53_p.M133T; B5701
YSPALNKTF

SEQ ID NO: 28253 - protein, 10 aa, Homo sapiens
  AACR GENIE Results; TP53_p.M133T; B4403
TYSPALNKTF

SEQ ID NO: 28254 - protein, 8 aa, Homo sapiens
  AACR GENIE Results; TP53_p.M133T; B0801
SPALNKTF

SEQ ID NO: 28255 - protein, 9 aa, Homo sapiens
  AACR GENIE Results; TP53_p.M133T; C0202
YSPALNKTF

SEQ ID NO: 28256 - protein, 9 aa, Homo sapiens
  AACR GENIE Results; TP53_p.M133T; A2402
YSPALNKTF

SEQ ID NO: 28257 - protein, 10 aa, Homo sapiens
  AACR GENIE Results; TP53_p.M133T; B4402
TYSPALNKTF

SEQ ID NO: 28258 - protein, 10 aa, Homo sapiens
  AACR GENIE Results; TP53_p.M133T; B1501
TYSPALNKTF

SEQ ID NO: 28259 - protein, 10 aa, Homo sapiens
  AACR GENIE Results; TP53_p.M246I; A6801
NSSCMGGINR

SEQ ID NO: 28260 - protein, 9 aa, Homo sapiens
  AACR GENIE Results; TP53_p.M246I; A6801
SSCMGGINR

SEQ ID NO: 28261 - protein, 9 aa, Homo sapiens
  AACR GENIE Results; TP53_p.M246I; A1101
SSCMGGINR

SEQ ID NO: 28262 - protein, 10 aa, Homo sapiens
  AACR GENIE Results; TP53_p.M246V; A6801
NSSCMGGVNR

SEQ ID NO: 28263 - protein, 9 aa, Homo sapiens
  AACR GENIE Results; TP53_p.M246V; A6801
SSCMGGVNR

SEQ ID NO: 28264 - protein, 8 aa, Homo sapiens
  AACR GENIE Results; TP53_p.M246V; A3101
SCMGGVNR

SEQ ID NO: 28265 - protein, 9 aa, Homo sapiens
  AACR GENIE Results; TP53_p.M246V; A3101
SSCMGGVNR

SEQ ID NO: 28266 - protein, 9 aa, Homo sapiens
  AACR GENIE Results; TP53_p.M246V; A3101
SCMGGVNRR

SEQ ID NO: 28267 - protein, 9 aa, Homo sapiens
  AACR GENIE Results; TP53_p.N131del; A2402
TYSPALKMF

SEQ ID NO: 28268 - protein, 9 aa, Homo sapiens
  AACR GENIE Results; TP53_p.N131del; A2301
TYSPALKMF

SEQ ID NO: 28269 - protein, 9 aa, Homo sapiens
  AACR GENIE Results; TP53_p.N131del; C0602
TYSPALKMF

SEQ ID NO: 28270 - protein, 9 aa, Homo sapiens
  AACR GENIE Results; TP53_p.N131del; C1402
TYSPALKMF

SEQ ID NO: 28271 - protein, 8 aa, Homo sapiens
  AACR GENIE Results; TP53_p.N131del; A0301
CTYSPALK

SEQ ID NO: 28272 - protein, 8 aa, Homo sapiens
  AACR GENIE Results; TP53_p.N131del; C1402
TYSPALKM

SEQ ID NO: 28273 - protein, 8 aa, Homo sapiens
  AACR GENIE Results; TP53_p.N131del; B3901
TYSPALKM

SEQ ID NO: 28274 - protein, 9 aa, Homo sapiens
  AACR GENIE Results; TP53_p.N131del; A0301
CTYSPALKM

SEQ ID NO: 28275 - protein, 10 aa, Homo sapiens
  AACR GENIE Results; TP53_p.N131del; A0301
VTCTYSPALK

SEQ ID NO: 28276 - protein, 8 aa, Homo sapiens
  AACR GENIE Results; TP53_p.N131del; A2301
TYSPALKM

SEQ ID NO: 28277 - protein, 10 aa, Homo sapiens
  AACR GENIE Results; TP53_p.N131del; A1101
VTCTYSPALK

SEQ ID NO: 28278 - protein, 8 aa, Homo sapiens
  AACR GENIE Results; TP53_p.N131del; A2601
TYSPALKM

SEQ ID NO: 28279 - protein, 10 aa, Homo sapiens
  AACR GENIE Results; TP53_p.N131I; A2301
TYSPALIKMF

SEQ ID NO: 28280 - protein, 10 aa, Homo sapiens
  AACR GENIE Results; TP53_p.N131I; A2402
TYSPALIKMF

SEQ ID NO: 28281 - protein, 9 aa, Homo sapiens
  AACR GENIE Results; TP53_p.N131I; A0301
CTYSPALIK

SEQ ID NO: 28282 - protein, 9 aa, Homo sapiens
  AACR GENIE Results; TP53_p.N131I; A1101
CTYSPALIK

SEQ ID NO: 28283 - protein, 9 aa, Homo sapiens
  AACR GENIE Results; TP53_p.N131I; A2402
TYSPALIKM

SEQ ID NO: 28284 - protein, 9 aa, Homo sapiens
  AACR GENIE Results; TP53_p.N131I; A2301
TYSPALIKM

SEQ ID NO: 28285 - protein, 9 aa, Homo sapiens
  AACR GENIE Results; TP53_p.N131I; C1402
TYSPALIKM

SEQ ID NO: 28286 - protein, 9 aa, Homo sapiens
  AACR GENIE Results; TP53_p.N131I; C1203
YSPALIKMF

SEQ ID NO: 28287 - protein, 9 aa, Homo sapiens
  AACR GENIE Results; TP53_p.N131I; C0702
TYSPALIKM

SEQ ID NO: 28288 - protein, 9 aa, Homo sapiens
  AACR GENIE Results; TP53_p.N131I; C0602
YSPALIKMF

SEQ ID NO: 28289 - protein, 9 aa, Homo sapiens
  AACR GENIE Results; TP53_p.N131I; A3303
TYSPALIKM

SEQ ID NO: 28290 - protein, 9 aa, Homo sapiens
  AACR GENIE Results; TP53_p.N131I; A2902
TYSPALIKM

SEQ ID NO: 28291 - protein, 8 aa, Homo sapiens
  AACR GENIE Results; TP53_p.N131I; B0702
SPALIKMF

SEQ ID NO: 28292 - protein, 9 aa, Homo sapiens
  AACR GENIE Results; TP53_p.N131I; C0202
YSPALIKMF

SEQ ID NO: 28293 - protein, 8 aa, Homo sapiens
  AACR GENIE Results; TP53_p.N131I; B0801
SPALIKMF

SEQ ID NO: 28294 - protein, 9 aa, Homo sapiens
  AACR GENIE Results; TP53_p.N131I; C0602
TYSPALIKM

SEQ ID NO: 28295 - protein, 9 aa, Homo sapiens
  AACR GENIE Results; TP53_p.N131I; B3801
TYSPALIKM

SEQ ID NO: 28296 - protein, 9 aa, Homo sapiens
  AACR GENIE Results; TP53_p.N239Tfs*8; A2402
NYMCTVPAW

SEQ ID NO: 28297 - protein, 9 aa, Homo sapiens
  AACR GENIE Results; TP53_p.N239Tfs*8; A2301
NYMCTVPAW

SEQ ID NO: 28298 - protein, 9 aa, Homo sapiens
  AACR GENIE Results; TP53_p.N247I; C0602
IRRPILTII

SEQ ID NO: 28299 - protein, 9 aa, Homo sapiens
  AACR GENIE Results; TP53_p.N247I; A1101
SCMGGMIRR

SEQ ID NO: 28300 - protein, 9 aa, Homo sapiens
  AACR GENIE Results; TP53_p.N310Tfs*35; A6801
TPAPLPSQR

SEQ ID NO: 28301 - protein, 10 aa, Homo sapiens
  AACR GENIE Results; TP53_p.N310Tfs*35; A6801
TTPAPLPSQR

SEQ ID NO: 28302 - protein, 10 aa, Homo sapiens
  AACR GENIE Results; TP53_p.N310Tfs*35; B0702
SPFRSVGVSA

SEQ ID NO: 28303 - protein, 9 aa, Homo sapiens
  AACR GENIE Results; TP53_p.N310Tfs*35; C0102
ALPTTPAPL

SEQ ID NO: 28304 - protein, 9 aa, Homo sapiens
  AACR GENIE Results; TP53_p.N310Tfs*35; C0102
ISPFRSVGV

SEQ ID NO: 28305 - protein, 9 aa, Homo sapiens
  AACR GENIE Results; TP53_p.N310Tfs*35; A3101
RSVGVSASR

SEQ ID NO: 28306 - protein, 8 aa, Homo sapiens
  AACR GENIE Results; TP53_p.N310Tfs*35; B5101
SPFRSVGV

SEQ ID NO: 28307 - protein, 8 aa, Homo sapiens
  AACR GENIE Results; TP53_p.N310Tfs*35; B0702
SPFRSVGV

SEQ ID NO: 28308 - protein, 9 aa, Homo sapiens
  AACR GENIE Results; TP53_p.N310Tfs*35; A6801
RSVGVSASR

SEQ ID NO: 28309 - protein, 9 aa, Homo sapiens
  AACR GENIE Results; TP53_p.N310Tfs*35; B5701
RSVGVSASR

SEQ ID NO: 28310 - protein, 8 aa, Homo sapiens
  AACR GENIE Results; TP53_p.N310Tfs*35; B0801
SPFRSVGV

SEQ ID NO: 28311 - protein, 11 aa, Homo sapiens
  AACR GENIE Results; TP53_p.N310Tfs*35; A0201
ALPTTPAPLPS

SEQ ID NO: 28312 - protein, 8 aa, Homo sapiens
  AACR GENIE Results; TP53_p.N310Tfs*35; B1302
SPFRSVGV

SEQ ID NO: 28313 - protein, 9 aa, Homo sapiens
  AACR GENIE Results; TP53_p.N310Tfs*35; A1101
RSVGVSASR

SEQ ID NO: 28314 - protein, 9 aa, Homo sapiens
  AACR GENIE Results; TP53_p.N310Tfs*35; A0301
RSVGVSASR

SEQ ID NO: 28315 - protein, 9 aa, Homo sapiens
  AACR GENIE Results; TP53_p.N310Tfs*35; A0201
ALPTTPAPL

SEQ ID NO: 28316 - protein, 8 aa, Homo sapiens
  AACR GENIE Results; TP53_p.N310Tfs*35; A3101
SVGVSASR

SEQ ID NO: 28317 - protein, 8 aa, Homo sapiens
  AACR GENIE Results; TP53_p.N310Tfs*35; B3501
LPTTPAPL

SEQ ID NO: 28318 - protein, 10 aa, Homo sapiens
  AACR GENIE Results; TP53_p.P151H; A3101
STHPPGTRVR

SEQ ID NO: 28319 - protein, 10 aa, Homo sapiens
  AACR GENIE Results; TP53_p.P151H; A6801
STHPPGTRVR

SEQ ID NO: 28320 - protein, 10 aa, Homo sapiens
  AACR GENIE Results; TP53_p.P151H; A3303
STHPPGTRVR

SEQ ID NO: 28321 - protein, 9 aa, Homo sapiens
  AACR GENIE Results; TP53_p.P151H; A3001
STHPPGTRV

SEQ ID NO: 28322 - protein, 10 aa, Homo sapiens
  AACR GENIE Results; TP53_p.P151H; A1101
STHPPGTRVR

SEQ ID NO: 28323 - protein, 8 aa, Homo sapiens
  AACR GENIE Results; TP53_p.P151H; A3101
STHPPGTR

SEQ ID NO: 28324 - protein, 9 aa, Homo sapiens
  AACR GENIE Results; TP53_p.P151H; A6801
DSTHPPGTR

SEQ ID NO: 28325 - protein, 8 aa, Homo sapiens
  AACR GENIE Results; TP53_p.P151H; A3303
STHPPGTR

SEQ ID NO: 28326 - protein, 9 aa, Homo sapiens
  AACR GENIE Results; TP53_p.P151H; A3303
DSTHPPGTR

SEQ ID NO: 28327 - protein, 9 aa, Homo sapiens
  AACR GENIE Results; TP53_p.P151H; C1502
STHPPGTRV

SEQ ID NO: 28328 - protein, 11 aa, Homo sapiens
  AACR GENIE Results; TP53_p.P151H; A6801
DSTHPPGTRVR

SEQ ID NO: 28329 - protein, 10 aa, Homo sapiens
  AACR GENIE Results; TP53_p.P151H; A0301
STHPPGTRVR

SEQ ID NO: 28330 - protein, 9 aa, Homo sapiens
  AACR GENIE Results; TP53_p.P151H; B0702
STHPPGTRV

SEQ ID NO: 28331 - protein, 9 aa, Homo sapiens
  AACR GENIE Results; TP53_p.P151R; B0702
STRPPGTRV

SEQ ID NO: 28332 - protein, 10 aa, Homo sapiens
  AACR GENIE Results; TP53_p.P151R; B0702
RPPGTRVRAM

SEQ ID NO: 28333 - protein, 10 aa, Homo sapiens
  AACR GENIE Results; TP53_p.P151R; A0301
STRPPGTRVR

SEQ ID NO: 28334 - protein, 9 aa, Homo sapiens
  AACR GENIE Results; TP53_p.P151R; C0602
TRPPGTRVR

SEQ ID NO: 28335 - protein, 10 aa, Homo sapiens
  AACR GENIE Results; TP53_p.P151S; A6801
STSPPGTRVR

SEQ ID NO: 28336 - protein, 10 aa, Homo sapiens
  AACR GENIE Results; TP53_p.P151S; B0702
SPPGTRVRAM

SEQ ID NO: 28337 - protein, 9 aa, Homo sapiens
  AACR GENIE Results; TP53_p.P151S; A6802
STSPPGTRV

SEQ ID NO: 28338 - protein, 10 aa, Homo sapiens
  AACR GENIE Results; TP53_p.P151S; A1101
STSPPGTRVR

SEQ ID NO: 28339 - protein, 11 aa, Homo sapiens
  AACR GENIE Results; TP53_p.P151S; A6801
DSTSPPGTRVR

SEQ ID NO: 28340 - protein, 8 aa, Homo sapiens
  AACR GENIE Results; TP53_p.P151S; B5101
TSPPGTRV

SEQ ID NO: 28341 - protein, 9 aa, Homo sapiens
  AACR GENIE Results; TP53_p.P151S; A6801
TSPPGTRVR

SEQ ID NO: 28342 - protein, 10 aa, Homo sapiens
  AACR GENIE Results; TP53_p.P151S; A3303
STSPPGTRVR

SEQ ID NO: 28343 - protein, 10 aa, Homo sapiens
  AACR GENIE Results; TP53_p.P151S; A3101
STSPPGTRVR

SEQ ID NO: 28344 - protein, 10 aa, Homo sapiens
  AACR GENIE Results; TP53_p.P151S; A6802
DSTSPPGTRV

SEQ ID NO: 28345 - protein, 9 aa, Homo sapiens
  AACR GENIE Results; TP53_p.P151S; A1101
STSPPGTRV

SEQ ID NO: 28346 - protein, 9 aa, Homo sapiens
  AACR GENIE Results; TP53_p.P151S; A3303
TSPPGTRVR

SEQ ID NO: 28347 - protein, 9 aa, Homo sapiens
  AACR GENIE Results; TP53_p.P151S; A6801
DSTSPPGTR

SEQ ID NO: 28348 - protein, 9 aa, Homo sapiens
  AACR GENIE Results; TP53_p.P151S; C1502
STSPPGTRV

SEQ ID NO: 28349 - protein, 9 aa, Homo sapiens
  AACR GENIE Results; TP53_p.P151S; A3303
DSTSPPGTR

SEQ ID NO: 28350 - protein, 9 aa, Homo sapiens
  AACR GENIE Results; TP53_p.P151S; B5801
STSPPGTRV

SEQ ID NO: 28351 - protein, 10 aa, Homo sapiens
  AACR GENIE Results; TP53_p.P151S; B5701
STSPPGTRVR

SEQ ID NO: 28352 - protein, 11 aa, Homo sapiens
  AACR GENIE Results; TP53_p.P151S; A6802
STSPPGTRVRA

SEQ ID NO: 28353 - protein, 10 aa, Homo sapiens
  AACR GENIE Results; TP53_p.P151S; B2702
VDSTSPPGTR

SEQ ID NO: 28354 - protein, 9 aa, Homo sapiens
  AACR GENIE Results; TP53_p.P151S; B1302
STSPPGTRV

SEQ ID NO: 28355 - protein, 11 aa, Homo sapiens
  AACR GENIE Results; TP53_p.P151S; A3303
DSTSPPGTRVR

SEQ ID NO: 28356 - protein, 9 aa, Homo sapiens
  AACR GENIE Results; TP53_p.P151T; A6801
TTPPGTRVR

SEQ ID NO: 28357 - protein, 10 aa, Homo sapiens
  AACR GENIE Results; TP53_p.P151T; A6801
STTPPGTRVR

SEQ ID NO: 28358 - protein, 11 aa, Homo sapiens
  AACR GENIE Results; TP53_p.P151T; A6801
DSTTPPGTRVR

SEQ ID NO: 28359 - protein, 9 aa, Homo sapiens
  AACR GENIE Results; TP53_p.P151T; A6801
DSTTPPGTR

SEQ ID NO: 28360 - protein, 10 aa, Homo sapiens
  AACR GENIE Results; TP53_p.P151T; B0702
TPPGTRVRAM

SEQ ID NO: 28361 - protein, 10 aa, Homo sapiens
  AACR GENIE Results; TP53_p.P151T; A1101
STTPPGTRVR

SEQ ID NO: 28362 - protein, 9 aa, Homo sapiens
  AACR GENIE Results; TP53_p.P151T; A1101
TTPPGTRVR

SEQ ID NO: 28363 - protein, 8 aa, Homo sapiens
  AACR GENIE Results; TP53_p.P151T; B5101
TTPPGTRV

SEQ ID NO: 28364 - protein, 10 aa, Homo sapiens
  AACR GENIE Results; TP53_p.P151T; A6801
VDSTTPPGTR

SEQ ID NO: 28365 - protein, 9 aa, Homo sapiens
  AACR GENIE Results; TP53_p.P152Afs*14; B0702
APWPSTSSH

SEQ ID NO: 28366 - protein, 9 aa, Homo sapiens
  AACR GENIE Results; TP53_p.P152Afs*14; B3501
APWPSTSSH

SEQ ID NO: 28367 - protein, 11 aa, Homo sapiens
  AACR GENIE Results; TP53_p.P152Afs*14; B3501
APWPSTSSHST

SEQ ID NO: 28368 - protein, 11 aa, Homo sapiens
  AACR GENIE Results; TP53_p.P152Afs*14; B0702
APWPSTSSHST

SEQ ID NO: 28369 - protein, 10 aa, Homo sapiens
  AACR GENIE Results; TP53_p.P152L; A6802
DSTPLPGTRV

SEQ ID NO: 28370 - protein, 8 aa, Homo sapiens
  AACR GENIE Results; TP53_p.P152L; B5101
TPLPGTRV

SEQ ID NO: 28371 - protein, 8 aa, Homo sapiens
  AACR GENIE Results; TP53_p.P152L; B5501
TPLPGTRV

SEQ ID NO: 28372 - protein, 9 aa, Homo sapiens
  AACR GENIE Results; TP53_p.P152L; A6801
DSTPLPGTR

SEQ ID NO: 28373 - protein, 10 aa, Homo sapiens
  AACR GENIE Results; TP53_p.P152L; B5501
TPLPGTRVRA

SEQ ID NO: 28374 - protein, 9 aa, Homo sapiens
  AACR GENIE Results; TP53_p.P152L; A3301
DSTPLPGTR

SEQ ID NO: 28375 - protein, 9 aa, Homo sapiens
  AACR GENIE Results; TP53_p.P152L; A3303
DSTPLPGTR

SEQ ID NO: 28376 - protein, 8 aa, Homo sapiens
  AACR GENIE Results; TP53_p.P152L; B0702
TPLPGTRV

SEQ ID NO: 28377 - protein, 11 aa, Homo sapiens
  AACR GENIE Results; TP53_p.P152L; A6801
DSTPLPGTRVR

SEQ ID NO: 28378 - protein, 10 aa, Homo sapiens
  AACR GENIE Results; TP53_p.P152L; A6801
STPLPGTRVR

SEQ ID NO: 28379 - protein, 10 aa, Homo sapiens
  AACR GENIE Results; TP53_p.P152L; A3303
STPLPGTRVR

SEQ ID NO: 28380 - protein, 10 aa, Homo sapiens
  AACR GENIE Results; TP53_p.P152L; A1101
STPLPGTRVR

SEQ ID NO: 28381 - protein, 9 aa, Homo sapiens
  AACR GENIE Results; TP53_p.P152L; B0801
LPGTRVRAM

SEQ ID NO: 28382 - protein, 9 aa, Homo sapiens
  AACR GENIE Results; TP53_p.P152L; A3303
TPLPGTRVR

SEQ ID NO: 28383 - protein, 9 aa, Homo sapiens
  AACR GENIE Results; TP53_p.P152L; B0702
LPGTRVRAM

SEQ ID NO: 28384 - protein, 10 aa, Homo sapiens
  AACR GENIE Results; TP53_p.P152L; A6801
DSTPLPGTRV

SEQ ID NO: 28385 - protein, 10 aa, Homo sapiens
  AACR GENIE Results; TP53_p.P152L; B2702
VDSTPLPGTR

SEQ ID NO: 28386 - protein, 10 aa, Homo sapiens
  AACR GENIE Results; TP53_p.P152L; A3101
STPLPGTRVR

SEQ ID NO: 28387 - protein, 9 aa, Homo sapiens
  AACR GENIE Results; TP53_p.P152L; A6802
STPLPGTRV

SEQ ID NO: 28388 - protein, 9 aa, Homo sapiens
  AACR GENIE Results; TP53_p.P152L; A1101
STPLPGTRV

SEQ ID NO: 28389 - protein, 9 aa, Homo sapiens
  AACR GENIE Results; TP53_p.P152L; B5501
TPLPGTRVR

SEQ ID NO: 28390 - protein, 11 aa, Homo sapiens
  AACR GENIE Results; TP53_p.P152L; A3301
DSTPLPGTRVR

SEQ ID NO: 28391 - protein, 9 aa, Homo sapiens
  AACR GENIE Results; TP53_p.P152Rfs*18; B5501
TPRPAPASA

SEQ ID NO: 28392 - protein, 9 aa, Homo sapiens
  AACR GENIE Results; TP53_p.P152Rfs*18; B5502
TPRPAPASA

SEQ ID NO: 28393 - protein, 9 aa, Homo sapiens
  AACR GENIE Results; TP53_p.P152Rfs*18; B0702
TPRPAPASA

SEQ ID NO: 28394 - protein, 11 aa, Homo sapiens
  AACR GENIE Results; TP53_p.P152Rfs*18; B5502
APWPSTSSHST

SEQ ID NO: 28395 - protein, 9 aa, Homo sapiens
  AACR GENIE Results; TP53_p.P152Rfs*18; B0702
APWPSTSSH

SEQ ID NO: 28396 - protein, 9 aa, Homo sapiens
  AACR GENIE Results; TP53_p.P152Rfs*18; B3906
TPRPAPASA

SEQ ID NO: 28397 - protein, 10 aa, Homo sapiens
  AACR GENIE Results; TP53_p.P152Rfs*18; B0702
TPRPAPASAP

SEQ ID NO: 28398 - protein, 10 aa, Homo sapiens
  AACR GENIE Results; TP53_p.P152Rfs*18; B5501
TPRPAPASAP

SEQ ID NO: 28399 - protein, 9 aa, Homo sapiens
  AACR GENIE Results; TP53_p.P152Rfs*18; B3501
APWPSTSSH

SEQ ID NO: 28400 - protein, 9 aa, Homo sapiens
  AACR GENIE Results; TP53_p.P152Rfs*18; A3001
VDSTPRPAP

SEQ ID NO: 28401 - protein, 9 aa, Homo sapiens
  AACR GENIE Results; TP53_p.P152Rfs*18; B5001
VDSTPRPAP

SEQ ID NO: 28402 - protein, 11 aa, Homo sapiens
  AACR GENIE Results; TP53_p.P152Rfs*18; B3501
APWPSTSSHST

SEQ ID NO: 28403 - protein, 11 aa, Homo sapiens
  AACR GENIE Results; TP53_p.P152Rfs*18; B0702
TPRPAPASAPW

SEQ ID NO: 28404 - protein, 9 aa, Homo sapiens
  AACR GENIE Results; TP53_p.P153Afs*28; B3801
AHDGGCEAL

SEQ ID NO: 28405 - protein, 9 aa, Homo sapiens
  AACR GENIE Results; TP53_p.P153Afs*28; B3901
AHDGGCEAL

SEQ ID NO: 28406 - protein, 9 aa, Homo sapiens
  AACR GENIE Results; TP53_p.P153Afs*28; A3303
STPPARHPR

SEQ ID NO: 28407 - protein, 9 aa, Homo sapiens
  AACR GENIE Results; TP53_p.P153Afs*28; A3101
STPPARHPR

SEQ ID NO: 28408 - protein, 10 aa, Homo sapiens
  AACR GENIE Results; TP53_p.P153Afs*28; A3303
DSTPPARHPR

SEQ ID NO: 28409 - protein, 10 aa, Homo sapiens
  AACR GENIE Results; TP53_p.P153Afs*28; A6801
DSTPPARHPR

SEQ ID NO: 28410 - protein, 9 aa, Homo sapiens
  AACR GENIE Results; TP53_p.P153Afs*28; A1101
STPPARHPR

SEQ ID NO: 28411 - protein, 10 aa, Homo sapiens
  AACR GENIE Results; TP53_p.P153Afs*28; B3503
TAHDGGCEAL

SEQ ID NO: 28412 - protein, 9 aa, Homo sapiens
  AACR GENIE Results; TP53_p.P190L; B1302
GLALPQHLI

SEQ ID NO: 28413 - protein, 9 aa, Homo sapiens
  AACR GENIE Results; TP53_p.P190L; C0802
CSDSDGLAL

SEQ ID NO: 28414 - protein, 8 aa, Homo sapiens
  AACR GENIE Results; TP53_p.P190L; B5101
LPQHLIRV

SEQ ID NO: 28415 - protein, 11 aa, Homo sapiens
  AACR GENIE Results; TP53_p.P190L; A0201
GLALPQHLIRV

SEQ ID NO: 28416 - protein, 9 aa, Homo sapiens
  AACR GENIE Results; TP53_p.P190L; A0201
ALPQHLIRV

SEQ ID NO: 28417 - protein, 9 aa, Homo sapiens
  AACR GENIE Results; TP53_p.P190L; A0201
GLALPQHLI

SEQ ID NO: 28418 - protein, 10 aa, Homo sapiens
  AACR GENIE Results; TP53_p.P190L; B5101
DGLALPQHLI

SEQ ID NO: 28419 - protein, 8 aa, Homo sapiens
  AACR GENIE Results; TP53_p.P190L; B5501
LPQHLIRV

SEQ ID NO: 28420 - protein, 11 aa, Homo sapiens
  AACR GENIE Results; TP53_p.P190T; A0201
GLATPQHLIRV

SEQ ID NO: 28421 - protein, 9 aa, Homo sapiens
  AACR GENIE Results; TP53_p.P190T; A0201
GLATPQHLI

SEQ ID NO: 28422 - protein, 10 aa, Homo sapiens
  AACR GENIE Results; TP53_p.P190T; B5101
DGLATPQHLI

SEQ ID NO: 28423 - protein, 8 aa, Homo sapiens
  AACR GENIE Results; TP53_p.P190T; B5101
TPQHLIRV

SEQ ID NO: 28424 - protein, 9 aa, Homo sapiens
  AACR GENIE Results; TP53_p.P191del; B5101
DGLAPQHLI

SEQ ID NO: 28425 - protein, 10 aa, Homo sapiens
  AACR GENIE Results; TP53_p.P191del; A0201
GLAPQHLIRV

SEQ ID NO: 28426 - protein, 8 aa, Homo sapiens
  AACR GENIE Results; TP53_p.P191del; B5501
APQHLIRV

SEQ ID NO: 28427 - protein, 8 aa, Homo sapiens
  AACR GENIE Results; TP53_p.P191del; B5101
DGLAPQHL

SEQ ID NO: 28428 - protein, 8 aa, Homo sapiens
  AACR GENIE Results; TP53_p.P191del; B1302
GLAPQHLI

SEQ ID NO: 28429 - protein, 10 aa, Homo sapiens
  AACR GENIE Results; TP53_p.P191del; B5501
APQHLIRVEG

SEQ ID NO: 28430 - protein, 9 aa, Homo sapiens
  AACR GENIE Results; TP53_p.P191del; B4002
SDGLAPQHL

SEQ ID NO: 28431 - protein, 9 aa, Homo sapiens
  AACR GENIE Results; TP53_p.P191del; A0301
GLAPQHLIR

SEQ ID NO: 28432 - protein, 9 aa, Homo sapiens
  AACR GENIE Results; TP53_p.P250L; A0201
RLILTIITL

SEQ ID NO: 28433 - protein, 9 aa, Homo sapiens
  AACR GENIE Results; TP53_p.P36Rfs*8; A0301
NVLSPLRPK

SEQ ID NO: 28434 - protein, 9 aa, Homo sapiens
  AACR GENIE Results; TP53_p.P36Rfs*8; A3303
ENNVLSPLR

SEQ ID NO: 28435 - protein, 9 aa, Homo sapiens
  AACR GENIE Results; TP53_p.P36Rfs*8; A1101
NVLSPLRPK

SEQ ID NO: 28436 - protein, 11 aa, Homo sapiens
  AACR GENIE Results; TP53_p.P36Rfs*8; B2702
LPENNVLSPLR

SEQ ID NO: 28437 - protein, 8 aa, Homo sapiens
  AACR GENIE Results; TP53_p.P36Rfs*8; A0301
VLSPLRPK

SEQ ID NO: 28438 - protein, 9 aa, Homo sapiens
  AACR GENIE Results; TP53_p.P36Rfs*8; A3301
ENNVLSPLR

SEQ ID NO: 28439 - protein, 10 aa, Homo sapiens
  AACR GENIE Results; TP53_p.P36Rfs*8; B5701
VLSPLRPKQW

SEQ ID NO: 28440 - protein, 9 aa, Homo sapiens
  AACR GENIE Results; TP53_p.P4L; B4901
EELQSDPSV

SEQ ID NO: 28441 - protein, 9 aa, Homo sapiens
  AACR GENIE Results; TP53_p.P4L; A3001
EELQSDPSV

SEQ ID NO: 28442 - protein, 9 aa, Homo sapiens
  AACR GENIE Results; TP53_p.P75Lfs*48; C0303
SCILGQPSL

SEQ ID NO: 28443 - protein, 9 aa, Homo sapiens
  AACR GENIE Results; TP53_p.P75Lfs*48; C0304
SCILGQPSL

SEQ ID NO: 28444 - protein, 9 aa, Homo sapiens
  AACR GENIE Results; TP53_p.P75Lfs*48; B1501
SCILGQPSL

SEQ ID NO: 28445 - protein, 9 aa, Homo sapiens
  AACR GENIE Results; TP53_p.P75Lfs*48; B0702
LPRKPTRAA

SEQ ID NO: 28446 - protein, 9 aa, Homo sapiens
  AACR GENIE Results; TP53_p.P75Lfs*48; B0702
SCILGQPSL

SEQ ID NO: 28447 - protein, 10 aa, Homo sapiens
  AACR GENIE Results; TP53_p.P75Lfs*48; A1101
ASCILGQPSL

SEQ ID NO: 28448 - protein, 9 aa, Homo sapiens
  AACR GENIE Results; TP53_p.P75Lfs*48; A0201
SCILGQPSL

SEQ ID NO: 28449 - protein, 9 aa, Homo sapiens
  AACR GENIE Results; TP53_p.P75Lfs*48; C1601
SCILGQPSL

SEQ ID NO: 28450 - protein, 9 aa, Homo sapiens
  AACR GENIE Results; TP53_p.P75Lfs*48; B0801
SCILGQPSL

SEQ ID NO: 28451 - protein, 11 aa, Homo sapiens
  AACR GENIE Results; TP53_p.P75Lfs*48; B0702
LPRKPTRAATV

SEQ ID NO: 28452 - protein, 9 aa, Homo sapiens
  AACR GENIE Results; TP53_p.P75Lfs*48; B4001
SCILGQPSL

SEQ ID NO: 28453 - protein, 9 aa, Homo sapiens
  AACR GENIE Results; TP53_p.P75Lfs*48; B3501
SCILGQPSL

SEQ ID NO: 28454 - protein, 8 aa, Homo sapiens
  AACR GENIE Results; TP53_p.P75Lfs*48; B5701
RAATVSVW

SEQ ID NO: 28455 - protein, 9 aa, Homo sapiens
  AACR GENIE Results; TP53_p.P75Lfs*48; A0301
ALHQQLLHR

SEQ ID NO: 28456 - protein, 9 aa, Homo sapiens
  AACR GENIE Results; TP53_p.P85Lfs*38; C0304
SCILGQPSL

SEQ ID NO: 28457 - protein, 9 aa, Homo sapiens
  AACR GENIE Results; TP53_p.P85Lfs*38; B1501
SCILGQPSL

SEQ ID NO: 28458 - protein, 9 aa, Homo sapiens
  AACR GENIE Results; TP53_p.P85Lfs*38; B0702
LPRKPTRAA

SEQ ID NO: 28459 - protein, 9 aa, Homo sapiens
  AACR GENIE Results; TP53_p.P85Lfs*38; B0702
SCILGQPSL

SEQ ID NO: 28460 - protein, 10 aa, Homo sapiens
  AACR GENIE Results; TP53_p.P85Lfs*38; A1101
ASCILGQPSL

SEQ ID NO: 28461 - protein, 9 aa, Homo sapiens
  AACR GENIE Results; TP53_p.P85Lfs*38; A0201
SCILGQPSL

SEQ ID NO: 28462 - protein, 9 aa, Homo sapiens
  AACR GENIE Results; TP53_p.P85Lfs*38; B0801
SCILGQPSL

SEQ ID NO: 28463 - protein, 11 aa, Homo sapiens
  AACR GENIE Results; TP53_p.P85Lfs*38; B0702
LPRKPTRAATV

SEQ ID NO: 28464 - protein, 9 aa, Homo sapiens
  AACR GENIE Results; TP53_p.P85Lfs*38; B0702
QPPPGPCHL

SEQ ID NO: 28465 - protein, 9 aa, Homo sapiens
  AACR GENIE Results; TP53_p.P85Lfs*38; B3501
SCILGQPSL

SEQ ID NO: 28466 - protein, 9 aa, Homo sapiens
  AACR GENIE Results; TP53_p.P85Lfs*38; B1501
HQPPPGPCH

SEQ ID NO: 28467 - protein, 9 aa, Homo sapiens
  AACR GENIE Results; TP53_p.P98Lfs*25; C0304
SCILGQPSL

SEQ ID NO: 28468 - protein, 9 aa, Homo sapiens
  AACR GENIE Results; TP53_p.P98Lfs*25; B0702
SCILGQPSL

SEQ ID NO: 28469 - protein, 9 aa, Homo sapiens
  AACR GENIE Results; TP53_p.P98Lfs*25; B0702
LPRKPTRAA

SEQ ID NO: 28470 - protein, 8 aa, Homo sapiens
  AACR GENIE Results; TP53_p.P98Lfs*25; A1101
SSSVLPRK

SEQ ID NO: 28471 - protein, 10 aa, Homo sapiens
  AACR GENIE Results; TP53_p.P98Lfs*25; A1101
ASCILGQPSL

SEQ ID NO: 28472 - protein, 9 aa, Homo sapiens
  AACR GENIE Results; TP53_p.P98Lfs*25; A0201
SCILGQPSL

SEQ ID NO: 28473 - protein, 9 aa, Homo sapiens
  AACR GENIE Results; TP53_p.P98Lfs*25; B0801
SCILGQPSL

SEQ ID NO: 28474 - protein, 9 aa, Homo sapiens
  AACR GENIE Results; TP53_p.P98Lfs*25; B3501
SCILGQPSL

SEQ ID NO: 28475 - protein, 11 aa, Homo sapiens
  AACR GENIE Results; TP53_p.P98Lfs*25; B0702
LPRKPTRAATV

SEQ ID NO: 28476 - protein, 9 aa, Homo sapiens
  AACR GENIE Results; TP53_p.Q136E; B4901
CELAKTCPV

SEQ ID NO: 28477 - protein, 9 aa, Homo sapiens
  AACR GENIE Results; TP53_p.R110L; C1402
TYQGSYGFL

SEQ ID NO: 28478 - protein, 11 aa, Homo sapiens
  AACR GENIE Results; TP53_p.R110L; B5701
KTYQGSYGFLL

SEQ ID NO: 28479 - protein, 10 aa, Homo sapiens
  AACR GENIE Results; TP53_p.R110L; A2301
TYQGSYGFLL

SEQ ID NO: 28480 - protein, 10 aa, Homo sapiens
  AACR GENIE Results; TP53_p.R110L; A0301
GSYGFLLGFL

SEQ ID NO: 28481 - protein, 11 aa, Homo sapiens
  AACR GENIE Results; TP53_p.R110L; A3101
KTYQGSYGFLL

SEQ ID NO: 28482 - protein, 9 aa, Homo sapiens
  AACR GENIE Results; TP53_p.R110P; A2902
GSYGFPLGF

SEQ ID NO: 28483 - protein, 9 aa, Homo sapiens
  AACR GENIE Results; TP53_p.R110P; A1101
GSYGFPLGF

SEQ ID NO: 28484 - protein, 8 aa, Homo sapiens
  AACR GENIE Results; TP53_p.R110P; A2402
SYGFPLGF

SEQ ID NO: 28485 - protein, 9 aa, Homo sapiens
  AACR GENIE Results; TP53_p.R110P; C1203
GSYGFPLGF

SEQ ID NO: 28486 - protein, 9 aa, Homo sapiens
  AACR GENIE Results; TP53_p.R110P; B5701
GSYGFPLGF

SEQ ID NO: 28487 - protein, 9 aa, Homo sapiens
  AACR GENIE Results; TP53_p.R110P; B1501
GSYGFPLGF

SEQ ID NO: 28488 - protein, 9 aa, Homo sapiens
  AACR GENIE Results; TP53_p.R110P; A0301
GSYGFPLGF

SEQ ID NO: 28489 - protein, 10 aa, Homo sapiens
  AACR GENIE Results; TP53_p.R110P; A0301
KTYQGSYGFP

SEQ ID NO: 28490 - protein, 9 aa, Homo sapiens
  AACR GENIE Results; TP53_p.R156P; B3501
TPVRAMAIY

SEQ ID NO: 28491 - protein, 10 aa, Homo sapiens
  AACR GENIE Results; TP53_p.R156P; A6801
STPPPGTPVR

SEQ ID NO: 28492 - protein, 9 aa, Homo sapiens
  AACR GENIE Results; TP53_p.R156P; A6801
TPPPGTPVR

SEQ ID NO: 28493 - protein, 11 aa, Homo sapiens
  AACR GENIE Results; TP53_p.R156P; A6801
DSTPPPGTPVR

SEQ ID NO: 28494 - protein, 8 aa, Homo sapiens
  AACR GENIE Results; TP53_p.R156P; B5101
TPPPGTPV

SEQ ID NO: 28495 - protein, 10 aa, Homo sapiens
  AACR GENIE Results; TP53_p.R156P; A1101
STPPPGTPVR

SEQ ID NO: 28496 - protein, 11 aa, Homo sapiens
  AACR GENIE Results; TP53_p.R156P; B3501
TPPPGTPVRAM

SEQ ID NO: 28497 - protein, 8 aa, Homo sapiens
  AACR GENIE Results; TP53_p.R156P; B5101
TPVRAMAI

SEQ ID NO: 28498 - protein, 9 aa, Homo sapiens
  AACR GENIE Results; TP53_p.R156P; C0102
STPPPGTPV

SEQ ID NO: 28499 - protein, 9 aa, Homo sapiens
  AACR GENIE Results; TP53_p.R156P; B5101
TPPPGTPVR

SEQ ID NO: 28500 - protein, 9 aa, Homo sapiens
  AACR GENIE Results; TP53_p.R156P; A2601
STPPPGTPV

SEQ ID NO: 28501 - protein, 8 aa, Homo sapiens
  AACR GENIE Results; TP53_p.R156P; A6801
TPPPGTPV

SEQ ID NO: 28502 - protein, 9 aa, Homo sapiens
  AACR GENIE Results; TP53_p.R156P; B5101
STPPPGTPV

SEQ ID NO: 28503 - protein, 11 aa, Homo sapiens
  AACR GENIE Results; TP53_p.R156P; B0702
TPPPGTPVRAM

SEQ ID NO: 28504 - protein, 9 aa, Homo sapiens
  AACR GENIE Results; TP53_p.R156P; B3501
TPPPGTPVR

SEQ ID NO: 28505 - protein, 9 aa, Homo sapiens
  AACR GENIE Results; TP53_p.R156P; B0702
STPPPGTPV

SEQ ID NO: 28506 - protein, 9 aa, Homo sapiens
  AACR GENIE Results; TP53_p.R156P; C0304
STPPPGTPV

SEQ ID NO: 28507 - protein, 9 aa, Homo sapiens
  AACR GENIE Results; TP53_p.R156P; C0303
STPPPGTPV

SEQ ID NO: 28508 - protein, 11 aa, Homo sapiens
  AACR GENIE Results; TP53_p.R156P; A1101
STPPPGTPVRA

SEQ ID NO: 28509 - protein, 9 aa, Homo sapiens
  AACR GENIE Results; TP53_p.R156P; A6801
STPPPGTPV

SEQ ID NO: 28510 - protein, 9 aa, Homo sapiens
  AACR GENIE Results; TP53_p.R158C; A0301
RVCAMAIYK

SEQ ID NO: 28511 - protein, 9 aa, Homo sapiens
  AACR GENIE Results; TP53_p.R158C; A1101
RVCAMAIYK

SEQ ID NO: 28512 - protein, 9 aa, Homo sapiens
  AACR GENIE Results; TP53_p.R158G; A0301
RVGAMAIYK

SEQ ID NO: 28513 - protein, 9 aa, Homo sapiens
  AACR GENIE Results; TP53_p.R158G; A1101
RVGAMAIYK

SEQ ID NO: 28514 - protein, 11 aa, Homo sapiens
  AACR GENIE Results; TP53_p.R158G; A0301
GTRVGAMAIYK

SEQ ID NO: 28515 - protein, 11 aa, Homo sapiens
  AACR GENIE Results; TP53_p.R158G; A1101
GTRVGAMAIYK

SEQ ID NO: 28516 - protein, 9 aa, Homo sapiens
  AACR GENIE Results; TP53_p.R158G; C0702
TRVGAMAIY

SEQ ID NO: 28517 - protein, 11 aa, Homo sapiens
  AACR GENIE Results; TP53_p.R158G; B0702
TPPPGTRVGAM

SEQ ID NO: 28518 - protein, 10 aa, Homo sapiens
  AACR GENIE Results; TP53_p.R158G; B0702
TPPPGTRVGA

SEQ ID NO: 28519 - protein, 9 aa, Homo sapiens
  AACR GENIE Results; TP53_p.R158G; B0702
PPGTRVGAM

SEQ ID NO: 28520 - protein, 8 aa, Homo sapiens
  AACR GENIE Results; TP53_p.R158G; A1101
VGAMAIYK

SEQ ID NO: 28521 - protein, 10 aa, Homo sapiens
  AACR GENIE Results; TP53_p.R158G; B0702
PPPGTRVGAM

SEQ ID NO: 28522 - protein, 11 aa, Homo sapiens
  AACR GENIE Results; TP53_p.R158G; B3501
TPPPGTRVGAM

SEQ ID NO: 28523 - protein, 9 aa, Homo sapiens
  AACR GENIE Results; TP53_p.R158H; A0301
RVHAMAIYK

SEQ ID NO: 28524 - protein, 9 aa, Homo sapiens
  AACR GENIE Results; TP53_p.R158H; B2702
TRVHAMAIY

SEQ ID NO: 28525 - protein, 9 aa, Homo sapiens
  AACR GENIE Results; TP53_p.R158H; A1101
RVHAMAIYK

SEQ ID NO: 28526 - protein, 11 aa, Homo sapiens
  AACR GENIE Results; TP53_p.R158H; B3503
TPPPGTRVHAM

SEQ ID NO: 28527 - protein, 11 aa, Homo sapiens
  AACR GENIE Results; TP53_p.R158H; A6802
STPPPGTRVHA

SEQ ID NO: 28528 - protein, 11 aa, Homo sapiens
  AACR GENIE Results; TP53_p.R158H; B3501
TPPPGTRVHAM

SEQ ID NO: 28529 - protein, 11 aa, Homo sapiens
  AACR GENIE Results; TP53_p.R158H; B0801
TPPPGTRVHAM

SEQ ID NO: 28530 - protein, 9 aa, Homo sapiens
  AACR GENIE Results; TP53_p.R158L; B0702
TPPPGTRVL

SEQ ID NO: 28531 - protein, 9 aa, Homo sapiens
  AACR GENIE Results; TP53_p.R158L; B3503
TPPPGTRVL

SEQ ID NO: 28532 - protein, 9 aa, Homo sapiens
  AACR GENIE Results; TP53_p.R158L; A1101
RVLAMAIYK

SEQ ID NO: 28533 - protein, 9 aa, Homo sapiens
  AACR GENIE Results; TP53_p.R158L; A0301
RVLAMAIYK

SEQ ID NO: 28534 - protein, 9 aa, Homo sapiens
  AACR GENIE Results; TP53_p.R158L; C0102
TPPPGTRVL

SEQ ID NO: 28535 - protein, 9 aa, Homo sapiens
  AACR GENIE Results; TP53_p.R158L; B2702
TRVLAMAIY

SEQ ID NO: 28536 - protein, 9 aa, Homo sapiens
  AACR GENIE Results; TP53_p.R158L; B3501
TPPPGTRVL

SEQ ID NO: 28537 - protein, 9 aa, Homo sapiens
  AACR GENIE Results; TP53_p.R158L; B3502
TPPPGTRVL

SEQ ID NO: 28538 - protein, 9 aa, Homo sapiens
  AACR GENIE Results; TP53_p.R158L; B5101
TPPPGTRVL

SEQ ID NO: 28539 - protein, 9 aa, Homo sapiens
  AACR GENIE Results; TP53_p.R158L; B5502
TPPPGTRVL

SEQ ID NO: 28540 - protein, 10 aa, Homo sapiens
  AACR GENIE Results; TP53_p.R158L; C0102
STPPPGTRVL

SEQ ID NO: 28541 - protein, 10 aa, Homo sapiens
  AACR GENIE Results; TP53_p.R158L; B5502
TPPPGTRVLA

SEQ ID NO: 28542 - protein, 11 aa, Homo sapiens
  AACR GENIE Results; TP53_p.R158L; A6802
STPPPGTRVLA

SEQ ID NO: 28543 - protein, 9 aa, Homo sapiens
  AACR GENIE Results; TP53_p.R158L; B3801
TPPPGTRVL

SEQ ID NO: 28544 - protein, 8 aa, Homo sapiens
  AACR GENIE Results; TP53_p.R158L; B0702
PPPGTRVL

SEQ ID NO: 28545 - protein, 11 aa, Homo sapiens
  AACR GENIE Results; TP53_p.R158L; B3501
TPPPGTRVLAM

SEQ ID NO: 28546 - protein, 9 aa, Homo sapiens
  AACR GENIE Results; TP53_p.R158P; A1101
RVPAMAIYK

SEQ ID NO: 28547 - protein, 9 aa, Homo sapiens
  AACR GENIE Results; TP53_p.R158P; A0301
RVPAMAIYK

SEQ ID NO: 28548 - protein, 11 aa, Homo sapiens
  AACR GENIE Results; TP53_p.R158P; A0301
GTRVPAMAIYK

SEQ ID NO: 28549 - protein, 11 aa, Homo sapiens
  AACR GENIE Results; TP53_p.R158P; A1101
GTRVPAMAIYK

SEQ ID NO: 28550 - protein, 10 aa, Homo sapiens
  AACR GENIE Results; TP53_p.R158P; B0702
TPPPGTRVPA

SEQ ID NO: 28551 - protein, 11 aa, Homo sapiens
  AACR GENIE Results; TP53_p.R158P; B3501
TPPPGTRVPAM

SEQ ID NO: 28552 - protein, 9 aa, Homo sapiens
  AACR GENIE Results; TP53_p.R158P; B2705
TRVPAMAIY

SEQ ID NO: 28553 - protein, 9 aa, Homo sapiens
  AACR GENIE Results; TP53_p.R158P; C0702
TRVPAMAIY

SEQ ID NO: 28554 - protein, 9 aa, Homo sapiens
  AACR GENIE Results; TP53_p.R158P; C0602
TRVPAMAIY

SEQ ID NO: 28555 - protein, 9 aa, Homo sapiens
  AACR GENIE Results; TP53_p.R175_R181del; B3801
QHMTEVVRC

SEQ ID NO: 28556 - protein, 8 aa, Homo sapiens
  AACR GENIE Results; TP53_p.R175_R181del; A0201
HMTEVVRC

SEQ ID NO: 28557 - protein, 9 aa, Homo sapiens
  AACR GENIE Results; TP53_p.R175G; A0201
HMTEVVRGC

SEQ ID NO: 28558 - protein, 9 aa, Homo sapiens
  AACR GENIE Results; TP53_p.R175H; B3801
QHMTEVVRH

SEQ ID NO: 28559 - protein, 8 aa, Homo sapiens
  AACR GENIE Results; TP53_p.R175H; C0803
HMTEVVRH

SEQ ID NO: 28560 - protein, 9 aa, Homo sapiens
  AACR GENIE Results; TP53_p.R175H; B1510
QHMTEVVRH

SEQ ID NO: 28561 - protein, 8 aa, Homo sapiens
  AACR GENIE Results; TP53_p.R175L; A0201
HMTEVVRL

SEQ ID NO: 28562 - protein, 8 aa, Homo sapiens
  AACR GENIE Results; TP53_p.R175L; B0801
HMTEVVRL

SEQ ID NO: 28563 - protein, 9 aa, Homo sapiens
  AACR GENIE Results; TP53_p.R181H; B3801
EHCSDSDGL

SEQ ID NO: 28564 - protein, 10 aa, Homo sapiens
  AACR GENIE Results; TP53_p.R181H; B4001
HEHCSDSDGL

SEQ ID NO: 28565 - protein, 10 aa, Homo sapiens
  AACR GENIE Results; TP53_p.R181P; B4001
HEPCSDSDGL

SEQ ID NO: 28566 - protein, 11 aa, Homo sapiens
  AACR GENIE Results; TP53_p.R196P; B3501
IPVEGNLRVEY

SEQ ID NO: 28567 - protein, 9 aa, Homo sapiens
  AACR GENIE Results; TP53_p.R196P; B5101
IPVEGNLRV

SEQ ID NO: 28568 - protein, 11 aa, Homo sapiens
  AACR GENIE Results; TP53_p.R196P; A0201
GLAPPQHLIPV

SEQ ID NO: 28569 - protein, 8 aa, Homo sapiens
  AACR GENIE Results; TP53_p.R196P; A6801
IPVEGNLR

SEQ ID NO: 28570 - protein, 11 aa, Homo sapiens
  AACR GENIE Results; TP53_p.R196P; B1501
IPVEGNLRVEY

SEQ ID NO: 28571 - protein, 9 aa, Homo sapiens
  AACR GENIE Results; TP53_p.R196P; B0702
IPVEGNLRV

SEQ ID NO: 28572 - protein, 9 aa, Homo sapiens
  AACR GENIE Results; TP53_p.R196Q; B1302
IQVEGNLRV

SEQ ID NO: 28573 - protein, 11 aa, Homo sapiens
  AACR GENIE Results; TP53_p.R196Q; A0201
GLAPPQHLIQV

SEQ ID NO: 28574 - protein, 11 aa, Homo sapiens
  AACR GENIE Results; TP53_p.R196Q; B1501
IQVEGNLRVEY

SEQ ID NO: 28575 - protein, 9 aa, Homo sapiens
  AACR GENIE Results; TP53_p.R196Q; A0206
IQVEGNLRV

SEQ ID NO: 28576 - protein, 10 aa, Homo sapiens
  AACR GENIE Results; TP53_p.R196Q; A3002
QVEGNLRVEY

SEQ ID NO: 28577 - protein, 9 aa, Homo sapiens
  AACR GENIE Results; TP53_p.R196Q; A0205
IQVEGNLRV

SEQ ID NO: 28578 - protein, 9 aa, Homo sapiens
  AACR GENIE Results; TP53_p.R196Q; B5101
APPQHLIQV

SEQ ID NO: 28579 - protein, 9 aa, Homo sapiens
  AACR GENIE Results; TP53_p.R196Q; B5502
APPQHLIQV

SEQ ID NO: 28580 - protein, 10 aa, Homo sapiens
  AACR GENIE Results; TP53_p.R196Q; B3501
QVEGNLRVEY

SEQ ID NO: 28581 - protein, 10 aa, Homo sapiens
  AACR GENIE Results; TP53_p.R196Q; B1501
QVEGNLRVEY

SEQ ID NO: 28582 - protein, 11 aa, Homo sapiens
  AACR GENIE Results; TP53_p.R196Q; A6802
GLAPPQHLIQV

SEQ ID NO: 28583 - protein, 10 aa, Homo sapiens
  AACR GENIE Results; TP53_p.R196Q; B5801
QVEGNLRVEY

SEQ ID NO: 28584 - protein, 9 aa, Homo sapiens
  AACR GENIE Results; TP53_p.R196Q; B0702
APPQHLIQV

SEQ ID NO: 28585 - protein, 10 aa, Homo sapiens
  AACR GENIE Results; TP53_p.R196Q; A0101
QVEGNLRVEY

SEQ ID NO: 28586 - protein, 10 aa, Homo sapiens
  AACR GENIE Results; TP53_p.R196Q; C0302
QVEGNLRVEY

SEQ ID NO: 28587 - protein, 11 aa, Homo sapiens
  AACR GENIE Results; TP53_p.R196Q; B1503
IQVEGNLRVEY

SEQ ID NO: 28588 - protein, 9 aa, Homo sapiens
  AACR GENIE Results; TP53_p.R196Q; B5501
APPQHLIQV

SEQ ID NO: 28589 - protein, 11 aa, Homo sapiens
  AACR GENIE Results; TP53_p.R196Q; A3002
IQVEGNLRVEY

SEQ ID NO: 28590 - protein, 10 aa, Homo sapiens
  AACR GENIE Results; TP53_p.R196Q; A2901
QVEGNLRVEY

SEQ ID NO: 28591 - protein, 9 aa, Homo sapiens
  AACR GENIE Results; TP53_p.R196Q; B5001
IQVEGNLRV

SEQ ID NO: 28592 - protein, 11 aa, Homo sapiens
  AACR GENIE Results; TP53_p.R196Q; B3501
IQVEGNLRVEY

SEQ ID NO: 28593 - protein, 10 aa, Homo sapiens
  AACR GENIE Results; TP53_p.R196Q; A6801
HLIQVEGNLR

SEQ ID NO: 28594 - protein, 11 aa, Homo sapiens
  AACR GENIE Results; TP53_p.R196Q; B1502
IQVEGNLRVEY

SEQ ID NO: 28595 - protein, 10 aa, Homo sapiens
  AACR GENIE Results; TP53_p.R196Q; C1602
LAPPQHLIQV

SEQ ID NO: 28596 - protein, 10 aa, Homo sapiens
  AACR GENIE Results; TP53_p.R196Q; B1502
QVEGNLRVEY

SEQ ID NO: 28597 - protein, 10 aa, Homo sapiens
  AACR GENIE Results; TP53_p.R196Q; B3901
QVEGNLRVEY

SEQ ID NO: 28598 - protein, 10 aa, Homo sapiens
  AACR GENIE Results; TP53_p.R196Q; B5701
QVEGNLRVEY

SEQ ID NO: 28599 - protein, 9 aa, Homo sapiens
  AACR GENIE Results; TP53_p.R196Q; A0201
IQVEGNLRV

SEQ ID NO: 28600 - protein, 11 aa, Homo sapiens
  AACR GENIE Results; TP53_p.R196Q; C0801
IQVEGNLRVEY

SEQ ID NO: 28601 - protein, 10 aa, Homo sapiens
  AACR GENIE Results; TP53_p.R196Q; B2702
QVEGNLRVEY

SEQ ID NO: 28602 - protein, 11 aa, Homo sapiens
  AACR GENIE Results; TP53_p.R196Q; B1302
GLAPPQHLIQV

SEQ ID NO: 28603 - protein, 11 aa, Homo sapiens
  AACR GENIE Results; TP53_p.R196Q; B4601
IQVEGNLRVEY

SEQ ID NO: 28604 - protein, 8 aa, Homo sapiens
  AACR GENIE Results; TP53_p.R196Q; B3906
QHLIQVEG

SEQ ID NO: 28605 - protein, 9 aa, Homo sapiens
  AACR GENIE Results; TP53_p.R209Kfs*6; A0201
YLDDKHFST

SEQ ID NO: 28606 - protein, 9 aa, Homo sapiens
  AACR GENIE Results; TP53_p.R209Kfs*6; B4403
VEYLDDKHF

SEQ ID NO: 28607 - protein, 9 aa, Homo sapiens
  AACR GENIE Results; TP53_p.R209Kfs*6; B0801
YLDDKHFST

SEQ ID NO: 28608 - protein, 9 aa, Homo sapiens
  AACR GENIE Results; TP53_p.R209Kfs*6; C0802
YLDDKHFST

SEQ ID NO: 28609 - protein, 9 aa, Homo sapiens
  AACR GENIE Results; TP53_p.R209Kfs*6; A6802
YLDDKHFST

SEQ ID NO: 28610 - protein, 10 aa, Homo sapiens
  AACR GENIE Results; TP53_p.R209Kfs*6; A3303
EYLDDKHFST

SEQ ID NO: 28611 - protein, 8 aa, Homo sapiens
  AACR GENIE Results; TP53_p.R209Kfs*6; B0801
LDDKHFST

SEQ ID NO: 28612 - protein, 9 aa, Homo sapiens
  AACR GENIE Results; TP53_p.R209Kfs*6; B4402
VEYLDDKHF

SEQ ID NO: 28613 - protein, 8 aa, Homo sapiens
  AACR GENIE Results; TP53_p.R209Kfs*6; A3303
EYLDDKHF

SEQ ID NO: 28614 - protein, 8 aa, Homo sapiens
  AACR GENIE Results; TP53_p.R209Kfs*6; A2301
EYLDDKHF

SEQ ID NO: 28615 - protein, 9 aa, Homo sapiens
  AACR GENIE Results; TP53_p.R209Kfs*6; A2301
VEYLDDKHF

SEQ ID NO: 28616 - protein, 9 aa, Homo sapiens
  AACR GENIE Results; TP53_p.R209Kfs*6; B2702
LRVEYLDDK

SEQ ID NO: 28617 - protein, 9 aa, Homo sapiens
  AACR GENIE Results; TP53_p.R209Kfs*6; A0301
YLDDKHFST

SEQ ID NO: 28618 - protein, 9 aa, Homo sapiens
  AACR GENIE Results; TP53_p.R213L; A0201
YLDDRNTFL

SEQ ID NO: 28619 - protein, 9 aa, Homo sapiens
  AACR GENIE Results; TP53_p.R213L; C0802
YLDDRNTFL

SEQ ID NO: 28620 - protein, 9 aa, Homo sapiens
  AACR GENIE Results; TP53_p.R213L; C0501
YLDDRNTFL

SEQ ID NO: 28621 - protein, 9 aa, Homo sapiens
  AACR GENIE Results; TP53_p.R213L; C1701
YLDDRNTFL

SEQ ID NO: 28622 - protein, 9 aa, Homo sapiens
  AACR GENIE Results; TP53_p.R213L; A6802
NTFLHSVVV

SEQ ID NO: 28623 - protein, 9 aa, Homo sapiens
  AACR GENIE Results; TP53_p.R213L; C0401
YLDDRNTFL

SEQ ID NO: 28624 - protein, 8 aa, Homo sapiens
  AACR GENIE Results; TP53_p.R213L; B1402
NTFLHSVV

SEQ ID NO: 28625 - protein, 10 aa, Homo sapiens
  AACR GENIE Results; TP53_p.R213L; A2301
EYLDDRNTFL

SEQ ID NO: 28626 - protein, 9 aa, Homo sapiens
  AACR GENIE Results; TP53_p.R213L; C1203
NTFLHSVVV

SEQ ID NO: 28627 - protein, 10 aa, Homo sapiens
  AACR GENIE Results; TP53_p.R213L; A2902
TFLHSVVVPY

SEQ ID NO: 28628 - protein, 8 aa, Homo sapiens
  AACR GENIE Results; TP53_p.R213L; C0802
LDDRNTFL

SEQ ID NO: 28629 - protein, 9 aa, Homo sapiens
  AACR GENIE Results; TP53_p.R213L; C0304
YLDDRNTFL

SEQ ID NO: 28630 - protein, 10 aa, Homo sapiens
  AACR GENIE Results; TP53_p.R213L; A2402
EYLDDRNTFL

SEQ ID NO: 28631 - protein, 9 aa, Homo sapiens
  AACR GENIE Results; TP53_p.R213L; C1502
RNTFLHSVV

SEQ ID NO: 28632 - protein, 9 aa, Homo sapiens
  AACR GENIE Results; TP53_p.R213L; B1402
DRNTFLHSV

SEQ ID NO: 28633 - protein, 8 aa, Homo sapiens
  AACR GENIE Results; TP53_p.R213L; C1203
NTFLHSVV

SEQ ID NO: 28634 - protein, 9 aa, Homo sapiens
  AACR GENIE Results; TP53_p.R213L; C1502
NTFLHSVVV

SEQ ID NO: 28635 - protein, 10 aa, Homo sapiens
  AACR GENIE Results; TP53_p.R213L; B2702
TFLHSVVVPY

SEQ ID NO: 28636 - protein, 9 aa, Homo sapiens
  AACR GENIE Results; TP53_p.R213L; A2902
FLHSVVVPY

SEQ ID NO: 28637 - protein, 9 aa, Homo sapiens
  AACR GENIE Results; TP53_p.R213L; C1502
YLDDRNTFL

SEQ ID NO: 28638 - protein, 11 aa, Homo sapiens
  AACR GENIE Results; TP53_p.R213L; B4901
VEYLDDRNTFL

SEQ ID NO: 28639 - protein, 10 aa, Homo sapiens
  AACR GENIE Results; TP53_p.R213L; A3303
EYLDDRNTFL

SEQ ID NO: 28640 - protein, 9 aa, Homo sapiens
  AACR GENIE Results; TP53_p.R213L; B3801
YLDDRNTFL

SEQ ID NO: 28641 - protein, 9 aa, Homo sapiens
  AACR GENIE Results; TP53_p.R213L; C0602
DRNTFLHSV

SEQ ID NO: 28642 - protein, 9 aa, Homo sapiens
  AACR GENIE Results; TP53_p.R213Q; C1203
NTFQHSVVV

SEQ ID NO: 28643 - protein, 9 aa, Homo sapiens
  AACR GENIE Results; TP53_p.R213Q; B1501
FQHSVVVPY

SEQ ID NO: 28644 - protein, 9 aa, Homo sapiens
  AACR GENIE Results; TP53_p.R213Q; C0202
FQHSVVVPY

SEQ ID NO: 28645 - protein, 8 aa, Homo sapiens
  AACR GENIE Results; TP53_p.R213Q; C1203
NTFQHSVV

SEQ ID NO: 28646 - protein, 9 aa, Homo sapiens
  AACR GENIE Results; TP53_p.R213Q; C0602
DRNTFQHSV

SEQ ID NO: 28647 - protein, 8 aa, Homo sapiens
  AACR GENIE Results; TP53_p.R248G; B5101
NGRPILTI

SEQ ID NO: 28648 - protein, 9 aa, Homo sapiens
  AACR GENIE Results; TP53_p.R248G; B0702
GGMNGRPIL

SEQ ID NO: 28649 - protein, 10 aa, Homo sapiens
  AACR GENIE Results; TP53_p.R248G; A1101
SCMGGMNGRP

SEQ ID NO: 28650 - protein, 9 aa, Homo sapiens
  AACR GENIE Results; TP53_p.R248L; A3303
SCMGGMNLR

SEQ ID NO: 28651 - protein, 9 aa, Homo sapiens
  AACR GENIE Results; TP53_p.R248L; A6801
SCMGGMNLR

SEQ ID NO: 28652 - protein, 9 aa, Homo sapiens
  AACR GENIE Results; TP53_p.R248L; A3101
SCMGGMNLR

SEQ ID NO: 28653 - protein, 10 aa, Homo sapiens
  AACR GENIE Results; TP53_p.R248L; A1101
SCMGGMNLRP

SEQ ID NO: 28654 - protein, 8 aa, Homo sapiens
  AACR GENIE Results; TP53_p.R248P; B5101
NPRPILTI

SEQ ID NO: 28655 - protein, 9 aa, Homo sapiens
  AACR GENIE Results; TP53_p.R248P; B5101
NPRPILTII

SEQ ID NO: 28656 - protein, 10 aa, Homo sapiens
  AACR GENIE Results; TP53_p.R248P; B1302
GMNPRPILTI

SEQ ID NO: 28657 - protein, 9 aa, Homo sapiens
  AACR GENIE Results; TP53_p.R248P; B0702
NPRPILTII

SEQ ID NO: 28658 - protein, 11 aa, Homo sapiens
  AACR GENIE Results; TP53_p.R248P; B0702
NPRPILTIITL

SEQ ID NO: 28659 - protein, 8 aa, Homo sapiens
  AACR GENIE Results; TP53_p.R248P; B0702
NPRPILTI

SEQ ID NO: 28660 - protein, 9 aa, Homo sapiens
  AACR GENIE Results; TP53_p.R248P; A6801
SCMGGMNPR

SEQ ID NO: 28661 - protein, 9 aa, Homo sapiens
  AACR GENIE Results; TP53_p.R248P; A1101
SCMGGMNPR

SEQ ID NO: 28662 - protein, 9 aa, Homo sapiens
  AACR GENIE Results; TP53_p.R248P; B0702
GGMNPRPIL

SEQ ID NO: 28663 - protein, 8 aa, Homo sapiens
  AACR GENIE Results; TP53_p.R248Q; B1302
NQRPILTI

SEQ ID NO: 28664 - protein, 9 aa, Homo sapiens
  AACR GENIE Results; TP53_p.R248Q; A3303
SCMGGMNQR

SEQ ID NO: 28665 - protein, 8 aa, Homo sapiens
  AACR GENIE Results; TP53_p.R248Q; B3906
NQRPILTI

SEQ ID NO: 28666 - protein, 9 aa, Homo sapiens
  AACR GENIE Results; TP53_p.R248Q; A6801
SCMGGMNQR

SEQ ID NO: 28667 - protein, 9 aa, Homo sapiens
  AACR GENIE Results; TP53_p.R248Q; B4102
GGMNQRPIL

SEQ ID NO: 28668 - protein, 9 aa, Homo sapiens
  AACR GENIE Results; TP53_p.R248Q; B1302
NQRPILTII

SEQ ID NO: 28669 - protein, 9 aa, Homo sapiens
  AACR GENIE Results; TP53_p.R248Q; A0203
NQRPILTII

SEQ ID NO: 28670 - protein, 9 aa, Homo sapiens
  AACR GENIE Results; TP53_p.R248Q; B1510
GGMNQRPIL

SEQ ID NO: 28671 - protein, 9 aa, Homo sapiens
  AACR GENIE Results; TP53_p.R248Q; A3101
SCMGGMNQR

SEQ ID NO: 28672 - protein, 9 aa, Homo sapiens
  AACR GENIE Results; TP53_p.R248Q; A1101
SCMGGMNQR

SEQ ID NO: 28673 - protein, 10 aa, Homo sapiens
  AACR GENIE Results; TP53_p.R248Q; B1302
GMNQRPILTI

SEQ ID NO: 28674 - protein, 9 aa, Homo sapiens
  AACR GENIE Results; TP53_p.R248Q; B3906
NQRPILTII

SEQ ID NO: 28675 - protein, 10 aa, Homo sapiens
  AACR GENIE Results; TP53_p.R248Q; A1101
SCMGGMNQRP

SEQ ID NO: 28676 - protein, 8 aa, Homo sapiens
  AACR GENIE Results; TP53_p.R248Q; B5101
NQRPILTI

SEQ ID NO: 28677 - protein, 9 aa, Homo sapiens
  AACR GENIE Results; TP53_p.R248Q; B4002
GGMNQRPIL

SEQ ID NO: 28678 - protein, 9 aa, Homo sapiens
  AACR GENIE Results; TP53_p.R248Q; B0702
GGMNQRPIL

SEQ ID NO: 28679 - protein, 9 aa, Homo sapiens
  AACR GENIE Results; TP53_p.R248Q; A3301
SCMGGMNQR

SEQ ID NO: 28680 - protein, 10 aa, Homo sapiens
  AACR GENIE Results; TP53_p.R248Q; A6801
SSCMGGMNQR

SEQ ID NO: 28681 - protein, 9 aa, Homo sapiens
  AACR GENIE Results; TP53_p.R248Q; A3001
NQRPILTII

SEQ ID NO: 28682 - protein, 10 aa, Homo sapiens
  AACR GENIE Results; TP53_p.R248Q; A0203
GMNQRPILTI

SEQ ID NO: 28683 - protein, 8 aa, Homo sapiens
  AACR GENIE Results; TP53_p.R248Q; B1402
NQRPILTI

SEQ ID NO: 28684 - protein, 9 aa, Homo sapiens
  AACR GENIE Results; TP53_p.R249G; C0602
NRGPILTII

SEQ ID NO: 28685 - protein, 9 aa, Homo sapiens
  AACR GENIE Results; TP53_p.R249G; B0702
GPILTIITL

SEQ ID NO: 28686 - protein, 8 aa, Homo sapiens
  AACR GENIE Results; TP53_p.R249G; C0602
NRGPILTI

SEQ ID NO: 28687 - protein, 9 aa, Homo sapiens
  AACR GENIE Results; TP53_p.R249G; B3501
GPILTIITL

SEQ ID NO: 28688 - protein, 9 aa, Homo sapiens
  AACR GENIE Results; TP53_p.R249G; B5101
GPILTIITL

SEQ ID NO: 28689 - protein, 9 aa, Homo sapiens
  AACR GENIE Results; TP53_p.R249K; B0702
KPILTIITL

SEQ ID NO: 28690 - protein, 9 aa, Homo sapiens
  AACR GENIE Results; TP53_p.R249K; C0602
NRKPILTII

SEQ ID NO: 28691 - protein, 9 aa, Homo sapiens
  AACR GENIE Results; TP53_p.R249K; B3503
KPILTIITL

SEQ ID NO: 28692 - protein, 9 aa, Homo sapiens
  AACR GENIE Results; TP53_p.R249K; B5501
KPILTIITL

SEQ ID NO: 28693 - protein, 9 aa, Homo sapiens
  AACR GENIE Results; TP53_p.R249K; B3501
KPILTIITL

SEQ ID NO: 28694 - protein, 9 aa, Homo sapiens
  AACR GENIE Results; TP53_p.R249K; A1101
SCMGGMNRK

SEQ ID NO: 28695 - protein, 8 aa, Homo sapiens
  AACR GENIE Results; TP53_p.R249K; B1402
NRKPILTI

SEQ ID NO: 28696 - protein, 9 aa, Homo sapiens
  AACR GENIE Results; TP53_p.R249K; B5101
KPILTIITL

SEQ ID NO: 28697 - protein, 9 aa, Homo sapiens
  AACR GENIE Results; TP53_p.R249M; B3503
MPILTIITL

SEQ ID NO: 28698 - protein, 9 aa, Homo sapiens
  AACR GENIE Results; TP53_p.R249M; B3501
MPILTIITL

SEQ ID NO: 28699 - protein, 9 aa, Homo sapiens
  AACR GENIE Results; TP53_p.R249M; B3502
MPILTIITL

SEQ ID NO: 28700 - protein, 9 aa, Homo sapiens
  AACR GENIE Results; TP53_p.R249M; B5101
MPILTIITL

SEQ ID NO: 28701 - protein, 9 aa, Homo sapiens
  AACR GENIE Results; TP53_p.R249M; C0602
NRMPILTII

SEQ ID NO: 28702 - protein, 9 aa, Homo sapiens
  AACR GENIE Results; TP53_p.R249M; B0702
MPILTIITL

SEQ ID NO: 28703 - protein, 9 aa, Homo sapiens
  AACR GENIE Results; TP53_p.R249M; B5501
MPILTIITL

SEQ ID NO: 28704 - protein, 9 aa, Homo sapiens
  AACR GENIE Results; TP53_p.R249M; B0801
MPILTIITL

SEQ ID NO: 28705 - protein, 10 aa, Homo sapiens
  AACR GENIE Results; TP53_p.R249M; B1302
GMNRMPILTI

SEQ ID NO: 28706 - protein, 8 aa, Homo sapiens
  AACR GENIE Results; TP53_p.R249M; C0602
NRMPILTI

SEQ ID NO: 28707 - protein, 9 aa, Homo sapiens
  AACR GENIE Results; TP53_p.R249M; B2705
NRMPILTII

SEQ ID NO: 28708 - protein, 9 aa, Homo sapiens
  AACR GENIE Results; TP53_p.R249S; B3503
SPILTIITL

SEQ ID NO: 28709 - protein, 9 aa, Homo sapiens
  AACR GENIE Results; TP53_p.R249S; C0602
NRSPILTII

SEQ ID NO: 28710 - protein, 9 aa, Homo sapiens
  AACR GENIE Results; TP53_p.R249S; B0702
SPILTIITL

SEQ ID NO: 28711 - protein, 9 aa, Homo sapiens
  AACR GENIE Results; TP53_p.R249S; B3501
SPILTIITL

SEQ ID NO: 28712 - protein, 10 aa, Homo sapiens
  AACR GENIE Results; TP53_p.R249S; B1302
GMNRSPILTI

SEQ ID NO: 28713 - protein, 9 aa, Homo sapiens
  AACR GENIE Results; TP53_p.R249S; B5501
SPILTIITL

SEQ ID NO: 28714 - protein, 9 aa, Homo sapiens
  AACR GENIE Results; TP53_p.R249S; B5101
SPILTIITL

SEQ ID NO: 28715 - protein, 8 aa, Homo sapiens
  AACR GENIE Results; TP53_p.R249S; C0602
NRSPILTI

SEQ ID NO: 28716 - protein, 9 aa, Homo sapiens
  AACR GENIE Results; TP53_p.R249S; B3801
NRSPILTII

SEQ ID NO: 28717 - protein, 9 aa, Homo sapiens
  AACR GENIE Results; TP53_p.R249S; B2705
NRSPILTII

SEQ ID NO: 28718 - protein, 9 aa, Homo sapiens
  AACR GENIE Results; TP53_p.R249S; B0801
SPILTIITL

SEQ ID NO: 28719 - protein, 9 aa, Homo sapiens
  AACR GENIE Results; TP53_p.R249S; A0201
GGMNRSPIL

SEQ ID NO: 28720 - protein, 9 aa, Homo sapiens
  AACR GENIE Results; TP53_p.R249T; B3501
TPILTIITL

SEQ ID NO: 28721 - protein, 9 aa, Homo sapiens
  AACR GENIE Results; TP53_p.R249T; B0702
TPILTIITL

SEQ ID NO: 28722 - protein, 9 aa, Homo sapiens
  AACR GENIE Results; TP53_p.R249T; C0602
NRTPILTII

SEQ ID NO: 28723 - protein, 9 aa, Homo sapiens
  AACR GENIE Results; TP53_p.R249T; B5101
TPILTIITL

SEQ ID NO: 28724 - protein, 9 aa, Homo sapiens
  AACR GENIE Results; TP53_p.R249T; B0801
TPILTIITL

SEQ ID NO: 28725 - protein, 9 aa, Homo sapiens
  AACR GENIE Results; TP53_p.R249T; A0201
GGMNRTPIL

SEQ ID NO: 28726 - protein, 9 aa, Homo sapiens
  AACR GENIE Results; TP53_p.R249W; C0602
NRWPILTII

SEQ ID NO: 28727 - protein, 9 aa, Homo sapiens
  AACR GENIE Results; TP53_p.R249W; B3501
WPILTIITL

SEQ ID NO: 28728 - protein, 9 aa, Homo sapiens
  AACR GENIE Results; TP53_p.R249W; B5101
WPILTIITL

SEQ ID NO: 28729 - protein, 9 aa, Homo sapiens
  AACR GENIE Results; TP53_p.R267L; A0201
GLNSFEVRV

SEQ ID NO: 28730 - protein, 10 aa, Homo sapiens
  AACR GENIE Results; TP53_p.R267L; A0201
NLLGLNSFEV

SEQ ID NO: 28731 - protein, 10 aa, Homo sapiens
  AACR GENIE Results; TP53_p.R267L; A0201
GLNSFEVRVC

SEQ ID NO: 28732 - protein, 9 aa, Homo sapiens
  AACR GENIE Results; TP53_p.R267P; A0201
LLGPNSFEV

SEQ ID NO: 28733 - protein, 10 aa, Homo sapiens
  AACR GENIE Results; TP53_p.R267P; A0201
NLLGPNSFEV

SEQ ID NO: 28734 - protein, 9 aa, Homo sapiens
  AACR GENIE Results; TP53_p.R267P; B1302
GPNSFEVRV

SEQ ID NO: 28735 - protein, 11 aa, Homo sapiens
  AACR GENIE Results; TP53_p.R267P; A0201
LLGPNSFEVRV

SEQ ID NO: 28736 - protein, 9 aa, Homo sapiens
  AACR GENIE Results; TP53_p.R267P; B1302
LLGPNSFEV

SEQ ID NO: 28737 - protein, 9 aa, Homo sapiens
  AACR GENIE Results; TP53_p.R267P; B5101
GPNSFEVRV

SEQ ID NO: 28738 - protein, 9 aa, Homo sapiens
  AACR GENIE Results; TP53_p.R267P; B0702
GPNSFEVRV

SEQ ID NO: 28739 - protein, 11 aa, Homo sapiens
  AACR GENIE Results; TP53_p.R267W; B4403
LEDSSGNLLGW

SEQ ID NO: 28740 - protein, 11 aa, Homo sapiens
  AACR GENIE Results; TP53_p.R267W; B4402
LEDSSGNLLGW

SEQ ID NO: 28741 - protein, 10 aa, Homo sapiens
  AACR GENIE Results; TP53_p.R267W; B4403
EDSSGNLLGW

SEQ ID NO: 28742 - protein, 9 aa, Homo sapiens
  AACR GENIE Results; TP53_p.R267W; B5701
DSSGNLLGW

SEQ ID NO: 28743 - protein, 9 aa, Homo sapiens
  AACR GENIE Results; TP53_p.R267W; A6801
DSSGNLLGW

SEQ ID NO: 28744 - protein, 10 aa, Homo sapiens
  AACR GENIE Results; TP53_p.R267W; B4402
EDSSGNLLGW

SEQ ID NO: 28745 - protein, 8 aa, Homo sapiens
  AACR GENIE Results; TP53_p.R267W; B5701
SSGNLLGW

SEQ ID NO: 28746 - protein, 10 aa, Homo sapiens
  AACR GENIE Results; TP53_p.R267W; A0201
NLLGWNSFEV

SEQ ID NO: 28747 - protein, 9 aa, Homo sapiens
  AACR GENIE Results; TP53_p.R267W; A0201
LLGWNSFEV

SEQ ID NO: 28748 - protein, 9 aa, Homo sapiens
  AACR GENIE Results; TP53_p.R273C; B2705
GRNSFEVCV

SEQ ID NO: 28749 - protein, 9 aa, Homo sapiens
  AACR GENIE Results; TP53_p.R273C; B3906
GRNSFEVCV

SEQ ID NO: 28750 - protein, 9 aa, Homo sapiens
  AACR GENIE Results; TP53_p.R273C; B3906
NSFEVCVCA

SEQ ID NO: 28751 - protein, 8 aa, Homo sapiens
  AACR GENIE Results; TP53_p.R273C; B3906
NSFEVCVC

SEQ ID NO: 28752 - protein, 9 aa, Homo sapiens
  AACR GENIE Results; TP53_p.R273C; A6802
NSFEVCVCA

SEQ ID NO: 28753 - protein, 9 aa, Homo sapiens
  AACR GENIE Results; TP53_p.R273H; B2705
GRNSFEVHV

SEQ ID NO: 28754 - protein, 9 aa, Homo sapiens
  AACR GENIE Results; TP53_p.R273H; B3906
NSFEVHVCA

SEQ ID NO: 28755 - protein, 8 aa, Homo sapiens
  AACR GENIE Results; TP53_p.R273H; B3906
NSFEVHVC

SEQ ID NO: 28756 - protein, 9 aa, Homo sapiens
  AACR GENIE Results; TP53_p.R273H; A6802
NSFEVHVCA

SEQ ID NO: 28757 - protein, 9 aa, Homo sapiens
  AACR GENIE Results; TP53_p.R273H; A0205
NSFEVHVCA

SEQ ID NO: 28758 - protein, 9 aa, Homo sapiens
  AACR GENIE Results; TP53_p.R273H; B3906
GRNSFEVHV

SEQ ID NO: 28759 - protein, 8 aa, Homo sapiens
  AACR GENIE Results; TP53_p.R273H; C1203
NSFEVHVC

SEQ ID NO: 28760 - protein, 9 aa, Homo sapiens
  AACR GENIE Results; TP53_p.R273H; C0602
GRNSFEVHV

SEQ ID NO: 28761 - protein, 8 aa, Homo sapiens
  AACR GENIE Results; TP53_p.R273H; B4002
NSFEVHVC

SEQ ID NO: 28762 - protein, 9 aa, Homo sapiens
  AACR GENIE Results; TP53_p.R273H; B5001
FEVHVCACP

SEQ ID NO: 28763 - protein, 9 aa, Homo sapiens
  AACR GENIE Results; TP53_p.R273H; A6801
NSFEVHVCA

SEQ ID NO: 28764 - protein, 9 aa, Homo sapiens
  AACR GENIE Results; TP53_p.R273L; B3906
NSFEVLVCA

SEQ ID NO: 28765 - protein, 9 aa, Homo sapiens
  AACR GENIE Results; TP53_p.R273L; A0205
NSFEVLVCA

SEQ ID NO: 28766 - protein, 9 aa, Homo sapiens
  AACR GENIE Results; TP53_p.R273L; A6802
NSFEVLVCA

SEQ ID NO: 28767 - protein, 9 aa, Homo sapiens
  AACR GENIE Results; TP53_p.R273L; A0206
NSFEVLVCA

SEQ ID NO: 28768 - protein, 9 aa, Homo sapiens
  AACR GENIE Results; TP53_p.R273L; B2705
GRNSFEVLV

SEQ ID NO: 28769 - protein, 9 aa, Homo sapiens
  AACR GENIE Results; TP53_p.R273L; B5001
FEVLVCACP

SEQ ID NO: 28770 - protein, 8 aa, Homo sapiens
  AACR GENIE Results; TP53_p.R273L; B3906
NSFEVLVC

SEQ ID NO: 28771 - protein, 9 aa, Homo sapiens
  AACR GENIE Results; TP53_p.R273L; B5001
NSFEVLVCA

SEQ ID NO: 28772 - protein, 9 aa, Homo sapiens
  AACR GENIE Results; TP53_p.R273L; C0602
GRNSFEVLV

SEQ ID NO: 28773 - protein, 8 aa, Homo sapiens
  AACR GENIE Results; TP53_p.R273L; B4002
FEVLVCAC

SEQ ID NO: 28774 - protein, 8 aa, Homo sapiens
  AACR GENIE Results; TP53_p.R273L; B1801
FEVLVCAC

SEQ ID NO: 28775 - protein, 9 aa, Homo sapiens
  AACR GENIE Results; TP53_p.R273P; B2705
GRNSFEVPV

SEQ ID NO: 28776 - protein, 8 aa, Homo sapiens
  AACR GENIE Results; TP53_p.R273P; B5101
NSFEVPVC

SEQ ID NO: 28777 - protein, 9 aa, Homo sapiens
  AACR GENIE Results; TP53_p.R273P; A6801
NSFEVPVCA

SEQ ID NO: 28778 - protein, 8 aa, Homo sapiens
  AACR GENIE Results; TP53_p.R273P; C1203
NSFEVPVC

SEQ ID NO: 28779 - protein, 8 aa, Homo sapiens
  AACR GENIE Results; TP53_p.R273P; B1801
FEVPVCAC

SEQ ID NO: 28780 - protein, 9 aa, Homo sapiens
  AACR GENIE Results; TP53_p.R273S; B2705
GRNSFEVSV

SEQ ID NO: 28781 - protein, 9 aa, Homo sapiens
  AACR GENIE Results; TP53_p.R273S; C0602
GRNSFEVSV

SEQ ID NO: 28782 - protein, 8 aa, Homo sapiens
  AACR GENIE Results; TP53_p.R273S; C1203
NSFEVSVC

SEQ ID NO: 28783 - protein, 9 aa, Homo sapiens
  AACR GENIE Results; TP53_p.R273S; A6801
NSFEVSVCA

SEQ ID NO: 28784 - protein, 9 aa, Homo sapiens
  AACR GENIE Results; TP53_p.R273S; B1302
GRNSFEVSV

SEQ ID NO: 28785 - protein, 9 aa, Homo sapiens
  AACR GENIE Results; TP53_p.R280Efs*65; A6801
TPAPLPSQR

SEQ ID NO: 28786 - protein, 10 aa, Homo sapiens
  AACR GENIE Results; TP53_p.R280Efs*65; A6801
TTPAPLPSQR

SEQ ID NO: 28787 - protein, 10 aa, Homo sapiens
  AACR GENIE Results; TP53_p.R280Efs*65; B0702
SPFRSVGVSA

SEQ ID NO: 28788 - protein, 9 aa, Homo sapiens
  AACR GENIE Results; TP53_p.R280Efs*65; C0102
ISPFRSVGV

SEQ ID NO: 28789 - protein, 9 aa, Homo sapiens
  AACR GENIE Results; TP53_p.R280Efs*65; A3101
RSVGVSASR

SEQ ID NO: 28790 - protein, 8 aa, Homo sapiens
  AACR GENIE Results; TP53_p.R280Efs*65; B5101
SPFRSVGV

SEQ ID NO: 28791 - protein, 8 aa, Homo sapiens
  AACR GENIE Results; TP53_p.R280Efs*65; B0702
SPFRSVGV

SEQ ID NO: 28792 - protein, 9 aa, Homo sapiens
  AACR GENIE Results; TP53_p.R280Efs*65; A6801
RSVGVSASR

SEQ ID NO: 28793 - protein, 9 aa, Homo sapiens
  AACR GENIE Results; TP53_p.R280Efs*65; B5701
RSVGVSASR

SEQ ID NO: 28794 - protein, 8 aa, Homo sapiens
  AACR GENIE Results; TP53_p.R280Efs*65; B0801
SPFRSVGV

SEQ ID NO: 28795 - protein, 8 aa, Homo sapiens
  AACR GENIE Results; TP53_p.R280Efs*65; B1302
SPFRSVGV

SEQ ID NO: 28796 - protein, 9 aa, Homo sapiens
  AACR GENIE Results; TP53_p.R280Efs*65; A1101
RSVGVSASR

SEQ ID NO: 28797 - protein, 10 aa, Homo sapiens
  AACR GENIE Results; TP53_p.R280Efs*65; A3001
MENISPFRSV

SEQ ID NO: 28798 - protein, 9 aa, Homo sapiens
  AACR GENIE Results; TP53_p.R280Efs*65; A0301
RSVGVSASR

SEQ ID NO: 28799 - protein, 9 aa, Homo sapiens
  AACR GENIE Results; TP53_p.R280Efs*65; B0702
RISARKGSL

SEQ ID NO: 28800 - protein, 10 aa, Homo sapiens
  AACR GENIE Results; TP53_p.R280Efs*65; A6801
TPAPLPSQRR

SEQ ID NO: 28801 - protein, 8 aa, Homo sapiens
  AACR GENIE Results; TP53_p.R280Efs*65; A3101
SVGVSASR

SEQ ID NO: 28802 - protein, 9 aa, Homo sapiens
  AACR GENIE Results; TP53_p.R283P; A0101
PTEEENLRK

SEQ ID NO: 28803 - protein, 11 aa, Homo sapiens
  AACR GENIE Results; TP53_p.R283P; A3101
RDRPTEEENLR

SEQ ID NO: 28804 - protein, 10 aa, Homo sapiens
  AACR GENIE Results; TP53_p.R283P; A3001
RDRPTEEENL

SEQ ID NO: 28805 - protein, 10 aa, Homo sapiens
  AACR GENIE Results; TP53_p.R290H; A1101
RTEEENLHKK

SEQ ID NO: 28806 - protein, 9 aa, Homo sapiens
  AACR GENIE Results; TP53_p.R290H; A1101
RTEEENLHK

SEQ ID NO: 28807 - protein, 10 aa, Homo sapiens
  AACR GENIE Results; TP53_p.R290H; A0301
RTEEENLHKK

SEQ ID NO: 28808 - protein, 9 aa, Homo sapiens
  AACR GENIE Results; TP53_p.R337L; A6802
ELFEMFREL

SEQ ID NO: 28809 - protein, 9 aa, Homo sapiens
  AACR GENIE Results; TP53_p.R337L; B5701
RGRELFEMF

SEQ ID NO: 28810 - protein, 9 aa, Homo sapiens
  AACR GENIE Results; TP53_p.S106R; B5701
KTYQGRYGF

SEQ ID NO: 28811 - protein, 9 aa, Homo sapiens
  AACR GENIE Results; TP53_p.S106R; A3201
KTYQGRYGF

SEQ ID NO: 28812 - protein, 9 aa, Homo sapiens
  AACR GENIE Results; TP53_p.S106R; B1501
SQKTYQGRY

SEQ ID NO: 28813 - protein, 9 aa, Homo sapiens
  AACR GENIE Results; TP53_p.S106R; C0602
GRYGFRLGF

SEQ ID NO: 28814 - protein, 9 aa, Homo sapiens
  AACR GENIE Results; TP53_p.S106R; B2705
GRYGFRLGF

SEQ ID NO: 28815 - protein, 8 aa, Homo sapiens
  AACR GENIE Results; TP53_p.S106R; A2301
TYQGRYGF

SEQ ID NO: 28816 - protein, 9 aa, Homo sapiens
  AACR GENIE Results; TP53_p.S106R; A3101
KTYQGRYGF

SEQ ID NO: 28817 - protein, 9 aa, Homo sapiens
  AACR GENIE Results; TP53_p.S106R; C1601
KTYQGRYGF

SEQ ID NO: 28818 - protein, 10 aa, Homo sapiens
  AACR GENIE Results; TP53_p.S106R; A3101
KTYQGRYGFR

SEQ ID NO: 28819 - protein, 9 aa, Homo sapiens
  AACR GENIE Results; TP53_p.S127F; A1101
CTYFPALNK

SEQ ID NO: 28820 - protein, 9 aa, Homo sapiens
  AACR GENIE Results; TP53_p.S127F; A0301
CTYFPALNK

SEQ ID NO: 28821 - protein, 9 aa, Homo sapiens
  AACR GENIE Results; TP53_p.S127F; C1402
YFPALNKMF

SEQ ID NO: 28822 - protein, 10 aa, Homo sapiens
  AACR GENIE Results; TP53_p.S127F; A2301
TYFPALNKMF

SEQ ID NO: 28823 - protein, 10 aa, Homo sapiens
  AACR GENIE Results; TP53_p.S127F; A2402
TYFPALNKMF

SEQ ID NO: 28824 - protein, 9 aa, Homo sapiens
  AACR GENIE Results; TP53_p.S127F; C1402
TYFPALNKM

SEQ ID NO: 28825 - protein, 9 aa, Homo sapiens
  AACR GENIE Results; TP53_p.S127F; A2402
TYFPALNKM

SEQ ID NO: 28826 - protein, 9 aa, Homo sapiens
  AACR GENIE Results; TP53_p.S127F; A2301
TYFPALNKM

SEQ ID NO: 28827 - protein, 9 aa, Homo sapiens
  AACR GENIE Results; TP53_p.S127F; C0303
VTCTYFPAL

SEQ ID NO: 28828 - protein, 8 aa, Homo sapiens
  AACR GENIE Results; TP53_p.S127F; C1402
YFPALNKM

SEQ ID NO: 28829 - protein, 10 aa, Homo sapiens
  AACR GENIE Results; TP53_p.S127F; C1402
TYFPALNKMF

SEQ ID NO: 28830 - protein, 10 aa, Homo sapiens
  AACR GENIE Results; TP53_p.S127F; B5701
TAKSVTCTYF

SEQ ID NO: 28831 - protein, 9 aa, Homo sapiens
  AACR GENIE Results; TP53_p.S127F; A2301
YFPALNKMF

SEQ ID NO: 28832 - protein, 9 aa, Homo sapiens
  AACR GENIE Results; TP53_p.S127F; C0602
TYFPALNKM

SEQ ID NO: 28833 - protein, 8 aa, Homo sapiens
  AACR GENIE Results; TP53_p.S127F; B3501
FPALNKMF

SEQ ID NO: 28834 - protein, 8 aa, Homo sapiens
  AACR GENIE Results; TP53_p.S127F; A3303
TYFPALNK

SEQ ID NO: 28835 - protein, 9 aa, Homo sapiens
  AACR GENIE Results; TP53_p.S127F; A3303
TYFPALNKM

SEQ ID NO: 28836 - protein, 10 aa, Homo sapiens
  AACR GENIE Results; TP53_p.S127F; A3101
TAKSVTCTYF

SEQ ID NO: 28837 - protein, 9 aa, Homo sapiens
  AACR GENIE Results; TP53_p.S127Y; A0301
CTYYPALNK

SEQ ID NO: 28838 - protein, 9 aa, Homo sapiens
  AACR GENIE Results; TP53_p.S127Y; A1101
CTYYPALNK

SEQ ID NO: 28839 - protein, 10 aa, Homo sapiens
  AACR GENIE Results; TP53_p.S127Y; A2402
TYYPALNKMF

SEQ ID NO: 28840 - protein, 9 aa, Homo sapiens
  AACR GENIE Results; TP53_p.S127Y; A2402
YYPALNKMF

SEQ ID NO: 28841 - protein, 9 aa, Homo sapiens
  AACR GENIE Results; TP53_p.S127Y; A2402
TYYPALNKM

SEQ ID NO: 28842 - protein, 11 aa, Homo sapiens
  AACR GENIE Results; TP53_p.S127Y; A0101
GTAKSVTCTYY

SEQ ID NO: 28843 - protein, 10 aa, Homo sapiens
  AACR GENIE Results; TP53_p.S127Y; B1501
TAKSVTCTYY

SEQ ID NO: 28844 - protein, 9 aa, Homo sapiens
  AACR GENIE Results; TP53_p.S127Y; B0702
TYYPALNKM

SEQ ID NO: 28845 - protein, 9 aa, Homo sapiens
  AACR GENIE Results; TP53_p.S127Y; C0702
YYPALNKMF

SEQ ID NO: 28846 - protein, 8 aa, Homo sapiens
  AACR GENIE Results; TP53_p.S127Y; B3501
YPALNKMF

SEQ ID NO: 28847 - protein, 9 aa, Homo sapiens
  AACR GENIE Results; TP53_p.S127Y; C0602
YYPALNKMF

SEQ ID NO: 28848 - protein, 9 aa, Homo sapiens
  AACR GENIE Results; TP53_p.S127Y; C0602
TYYPALNKM

SEQ ID NO: 28849 - protein, 8 aa, Homo sapiens
  AACR GENIE Results; TP53_p.S127Y; A0301
TYYPALNK

SEQ ID NO: 28850 - protein, 9 aa, Homo sapiens
  AACR GENIE Results; TP53_p.S127Y; C0702
TYYPALNKM

SEQ ID NO: 28851 - protein, 8 aa, Homo sapiens
  AACR GENIE Results; TP53_p.S127Y; B0801
YPALNKMF

SEQ ID NO: 28852 - protein, 10 aa, Homo sapiens
  AACR GENIE Results; TP53_p.S127Y; C0202
TAKSVTCTYY

SEQ ID NO: 28853 - protein, 9 aa, Homo sapiens
  AACR GENIE Results; TP53_p.S215G; C0702
FRHGVVVPY

SEQ ID NO: 28854 - protein, 9 aa, Homo sapiens
  AACR GENIE Results; TP53_p.S215G; C1203
NTFRHGVVV

SEQ ID NO: 28855 - protein, 9 aa, Homo sapiens
  AACR GENIE Results; TP53_p.S215G; C0602
FRHGVVVPY

SEQ ID NO: 28856 - protein, 9 aa, Homo sapiens
  AACR GENIE Results; TP53_p.S215I; C1203
NTFRHIVVV

SEQ ID NO: 28857 - protein, 8 aa, Homo sapiens
  AACR GENIE Results; TP53_p.S215I; C1203
NTFRHIVV

SEQ ID NO: 28858 - protein, 9 aa, Homo sapiens
  AACR GENIE Results; TP53_p.S215I; C1502
NTFRHIVVV

SEQ ID NO: 28859 - protein, 9 aa, Homo sapiens
  AACR GENIE Results; TP53_p.S215I; C1502
RNTFRHIVV

SEQ ID NO: 28860 - protein, 9 aa, Homo sapiens
  AACR GENIE Results; TP53_p.S215I; C0702
FRHIVVVPY

SEQ ID NO: 28861 - protein, 9 aa, Homo sapiens
  AACR GENIE Results; TP53_p.S241F; C1402
HYNYMCNSF

SEQ ID NO: 28862 - protein, 10 aa, Homo sapiens
  AACR GENIE Results; TP53_p.S241F; A6801
NSFCMGGMNR

SEQ ID NO: 28863 - protein, 9 aa, Homo sapiens
  AACR GENIE Results; TP53_p.S241F; A2402
HYNYMCNSF

SEQ ID NO: 28864 - protein, 8 aa, Homo sapiens
  AACR GENIE Results; TP53_p.S241F; A3303
FCMGGMNR

SEQ ID NO: 28865 - protein, 9 aa, Homo sapiens
  AACR GENIE Results; TP53_p.S241F; A3303
SFCMGGMNR

SEQ ID NO: 28866 - protein, 9 aa, Homo sapiens
  AACR GENIE Results; TP53_p.S241F; A2301
HYNYMCNSF

SEQ ID NO: 28867 - protein, 9 aa, Homo sapiens
  AACR GENIE Results; TP53_p.S241T; A1101
STCMGGMNR

SEQ ID NO: 28868 - protein, 10 aa, Homo sapiens
  AACR GENIE Results; TP53_p.S241Y; A6801
NSYCMGGMNR

SEQ ID NO: 28869 - protein, 9 aa, Homo sapiens
  AACR GENIE Results; TP53_p.S90Pfs*33; B5501
LPRKPTRAA

SEQ ID NO: 28870 - protein, 10 aa, Homo sapiens
  AACR GENIE Results; TP53_p.S90Pfs*33; B0702
APAPPGPCHL

SEQ ID NO: 28871 - protein, 9 aa, Homo sapiens
  AACR GENIE Results; TP53_p.S90Pfs*33; A3001
SCILGQPSL

SEQ ID NO: 28872 - protein, 9 aa, Homo sapiens
  AACR GENIE Results; TP53_p.S90Pfs*33; C0303
SCILGQPSL

SEQ ID NO: 28873 - protein, 9 aa, Homo sapiens
  AACR GENIE Results; TP53_p.S90Pfs*33; B0702
APAPPGPCH

SEQ ID NO: 28874 - protein, 9 aa, Homo sapiens
  AACR GENIE Results; TP53_p.S90Pfs*33; C0304
SCILGQPSL

SEQ ID NO: 28875 - protein, 9 aa, Homo sapiens
  AACR GENIE Results; TP53_p.S90Pfs*33; B2702
TRAATVSVW

SEQ ID NO: 28876 - protein, 9 aa, Homo sapiens
  AACR GENIE Results; TP53_p.S90Pfs*33; B1501
SCILGQPSL

SEQ ID NO: 28877 - protein, 9 aa, Homo sapiens
  AACR GENIE Results; TP53_p.S90Pfs*33; B0702
LPRKPTRAA

SEQ ID NO: 28878 - protein, 9 aa, Homo sapiens
  AACR GENIE Results; TP53_p.S90Pfs*33; B0702
SCILGQPSL

SEQ ID NO: 28879 - protein, 10 aa, Homo sapiens
  AACR GENIE Results; TP53_p.S90Pfs*33; A1101
ASCILGQPSL

SEQ ID NO: 28880 - protein, 9 aa, Homo sapiens
  AACR GENIE Results; TP53_p.S90Pfs*33; A0201
SCILGQPSL

SEQ ID NO: 28881 - protein, 9 aa, Homo sapiens
  AACR GENIE Results; TP53_p.S90Pfs*33; C1601
SCILGQPSL

SEQ ID NO: 28882 - protein, 11 aa, Homo sapiens
  AACR GENIE Results; TP53_p.S90Pfs*33; B5501
LPRKPTRAATV

SEQ ID NO: 28883 - protein, 9 aa, Homo sapiens
  AACR GENIE Results; TP53_p.S90Pfs*33; B0801
SCILGQPSL

SEQ ID NO: 28884 - protein, 9 aa, Homo sapiens
  AACR GENIE Results; TP53_p.S90Pfs*33; B3501
APAPPGPCH

SEQ ID NO: 28885 - protein, 9 aa, Homo sapiens
  AACR GENIE Results; TP53_p.S90Pfs*33; B1302
SCILGQPSL

SEQ ID NO: 28886 - protein, 11 aa, Homo sapiens
  AACR GENIE Results; TP53_p.S90Pfs*33; B0702
LPRKPTRAATV

SEQ ID NO: 28887 - protein, 9 aa, Homo sapiens
  AACR GENIE Results; TP53_p.S90Pfs*33; B4001
SCILGQPSL

SEQ ID NO: 28888 - protein, 9 aa, Homo sapiens
  AACR GENIE Results; TP53_p.S90Pfs*33; B0702
APPGPCHLL

SEQ ID NO: 28889 - protein, 9 aa, Homo sapiens
  AACR GENIE Results; TP53_p.S90Pfs*33; B3801
TRAATVSVW

SEQ ID NO: 28890 - protein, 9 aa, Homo sapiens
  AACR GENIE Results; TP53_p.S90Pfs*33; B3501
SCILGQPSL

SEQ ID NO: 28891 - protein, 8 aa, Homo sapiens
  AACR GENIE Results; TP53_p.S90Pfs*33; B5701
RAATVSVW

SEQ ID NO: 28892 - protein, 9 aa, Homo sapiens
  AACR GENIE Results; TP53_p.T118Qfs*5; A0201
FLHSGQPSL

SEQ ID NO: 28893 - protein, 9 aa, Homo sapiens
  AACR GENIE Results; TP53_p.T118Qfs*5; B1302
FLHSGQPSL

SEQ ID NO: 28894 - protein, 8 aa, Homo sapiens
  AACR GENIE Results; TP53_p.T118Qfs*5; B3901
LHSGQPSL

SEQ ID NO: 28895 - protein, 9 aa, Homo sapiens
  AACR GENIE Results; TP53_p.T118Qfs*5; C0304
FLHSGQPSL

SEQ ID NO: 28896 - protein, 9 aa, Homo sapiens
  AACR GENIE Results; TP53_p.T118Qfs*5; C0102
FLHSGQPSL

SEQ ID NO: 28897 - protein, 9 aa, Homo sapiens
  AACR GENIE Results; TP53_p.T118Qfs*5; B3503
FLHSGQPSL

SEQ ID NO: 28898 - protein, 9 aa, Homo sapiens
  AACR GENIE Results; TP53_p.T118Qfs*5; A3001
FLHSGQPSL

SEQ ID NO: 28899 - protein, 9 aa, Homo sapiens
  AACR GENIE Results; TP53_p.T118Qfs*5; B3901
FLHSGQPSL

SEQ ID NO: 28900 - protein, 9 aa, Homo sapiens
  AACR GENIE Results; TP53_p.T118Qfs*5; C0303
FLHSGQPSL

SEQ ID NO: 28901 - protein, 9 aa, Homo sapiens
  AACR GENIE Results; TP53_p.T118Qfs*5; B1501
FLHSGQPSL

SEQ ID NO: 28902 - protein, 8 aa, Homo sapiens
  AACR GENIE Results; TP53_p.T118Qfs*5; B3801
LHSGQPSL

SEQ ID NO: 28903 - protein, 9 aa, Homo sapiens
  AACR GENIE Results; TP53_p.T118Qfs*5; B0801
FLHSGQPSL

SEQ ID NO: 28904 - protein, 9 aa, Homo sapiens
  AACR GENIE Results; TP53_p.T118Qfs*5; B3801
FLHSGQPSL

SEQ ID NO: 28905 - protein, 9 aa, Homo sapiens
  AACR GENIE Results; TP53_p.T118Qfs*5; B4002
FLHSGQPSL

SEQ ID NO: 28906 - protein, 9 aa, Homo sapiens
  AACR GENIE Results; TP53_p.T118Qfs*5; C1701
FLHSGQPSL

SEQ ID NO: 28907 - protein, 9 aa, Homo sapiens
  AACR GENIE Results; TP53_p.T118Qfs*5; B5001
FLHSGQPSL

SEQ ID NO: 28908 - protein, 9 aa, Homo sapiens
  AACR GENIE Results; TP53_p.T118Qfs*5; A6802
FLHSGQPSL

SEQ ID NO: 28909 - protein, 9 aa, Homo sapiens
  AACR GENIE Results; TP53_p.T118Qfs*5; B3502
FLHSGQPSL

SEQ ID NO: 28910 - protein, 9 aa, Homo sapiens
  AACR GENIE Results; TP53_p.T118Qfs*5; B5801
FLHSGQPSL

SEQ ID NO: 28911 - protein, 9 aa, Homo sapiens
  AACR GENIE Results; TP53_p.T118Qfs*5; B3501
FLHSGQPSL

SEQ ID NO: 28912 - protein, 9 aa, Homo sapiens
  AACR GENIE Results; TP53_p.T118Qfs*5; C1402
FLHSGQPSL

SEQ ID NO: 28913 - protein, 9 aa, Homo sapiens
  AACR GENIE Results; TP53_p.T118Qfs*5; C0202
FLHSGQPSL

SEQ ID NO: 28914 - protein, 9 aa, Homo sapiens
  AACR GENIE Results; TP53_p.T118Qfs*5; B0702
FLHSGQPSL

SEQ ID NO: 28915 - protein, 9 aa, Homo sapiens
  AACR GENIE Results; TP53_p.T118Qfs*5; C0802
FLHSGQPSL

SEQ ID NO: 28916 - protein, 9 aa, Homo sapiens
  AACR GENIE Results; TP53_p.T118Qfs*5; C0704
FLHSGQPSL

SEQ ID NO: 28917 - protein, 9 aa, Homo sapiens
  AACR GENIE Results; TP53_p.T118Qfs*5; C1502
FLHSGQPSL

SEQ ID NO: 28918 - protein, 9 aa, Homo sapiens
  AACR GENIE Results; TP53_p.T118Qfs*5; B4001
FLHSGQPSL

SEQ ID NO: 28919 - protein, 8 aa, Homo sapiens
  AACR GENIE Results; TP53_p.T118Qfs*5; B4002
LHSGQPSL

SEQ ID NO: 28920 - protein, 9 aa, Homo sapiens
  AACR GENIE Results; TP53_p.T118Qfs*5; C1601
FLHSGQPSL

SEQ ID NO: 28921 - protein, 9 aa, Homo sapiens
  AACR GENIE Results; TP53_p.T118Qfs*5; A2301
FLHSGQPSL

SEQ ID NO: 28922 - protein, 9 aa, Homo sapiens
  AACR GENIE Results; TP53_p.T118Qfs*5; B2705
FLHSGQPSL

SEQ ID NO: 28923 - protein, 9 aa, Homo sapiens
  AACR GENIE Results; TP53_p.T118Qfs*5; A0301
FLHSGQPSL

SEQ ID NO: 28924 - protein, 9 aa, Homo sapiens
  AACR GENIE Results; TP53_p.T118Qfs*5; C0401
FLHSGQPSL

SEQ ID NO: 28925 - protein, 8 aa, Homo sapiens
  AACR GENIE Results; TP53_p.T118Qfs*5; B2705
LHSGQPSL

SEQ ID NO: 28926 - protein, 9 aa, Homo sapiens
  AACR GENIE Results; TP53_p.T118Qfs*5; C0501
FLHSGQPSL

SEQ ID NO: 28927 - protein, 10 aa, Homo sapiens
  AACR GENIE Results; TP53_p.T118Qfs*5; A3101
GFLHSGQPSL

SEQ ID NO: 28928 - protein, 10 aa, Homo sapiens
  AACR GENIE Results; TP53_p.T118Qfs*5; A2902
GFLHSGQPSL

SEQ ID NO: 28929 - protein, 10 aa, Homo sapiens
  AACR GENIE Results; TP53_p.T118Qfs*5; A2301
GFLHSGQPSL

SEQ ID NO: 28930 - protein, 9 aa, Homo sapiens
  AACR GENIE Results; TP53_p.T118Qfs*5; A2402
FLHSGQPSL

SEQ ID NO: 28931 - protein, 9 aa, Homo sapiens
  AACR GENIE Results; TP53_p.T118Qfs*5; A2601
FLHSGQPSL

SEQ ID NO: 28932 - protein, 9 aa, Homo sapiens
  AACR GENIE Results; TP53_p.T118Qfs*5; C1203
FLHSGQPSL

SEQ ID NO: 28933 - protein, 10 aa, Homo sapiens
  AACR GENIE Results; TP53_p.T118Qfs*5; B4002
GFLHSGQPSL

SEQ ID NO: 28934 - protein, 9 aa, Homo sapiens
  AACR GENIE Results; TP53_p.T118Qfs*5; A6801
FLHSGQPSL

SEQ ID NO: 28935 - protein, 9 aa, Homo sapiens
  AACR GENIE Results; TP53_p.T118Qfs*5; A2902
FLHSGQPSL

SEQ ID NO: 28936 - protein, 8 aa, Homo sapiens
  AACR GENIE Results; TP53_p.T118Qfs*5; B0702
LHSGQPSL

SEQ ID NO: 28937 - protein, 9 aa, Homo sapiens
  AACR GENIE Results; TP53_p.T118Qfs*5; B5701
FLHSGQPSL

SEQ ID NO: 28938 - protein, 10 aa, Homo sapiens
  AACR GENIE Results; TP53_p.T118Qfs*5; A3001
GFLHSGQPSL

SEQ ID NO: 28939 - protein, 8 aa, Homo sapiens
  AACR GENIE Results; TP53_p.T118Qfs*5; B3503
LHSGQPSL

SEQ ID NO: 28940 - protein, 10 aa, Homo sapiens
  AACR GENIE Results; TP53_p.T118Qfs*5; C1402
GFLHSGQPSL

SEQ ID NO: 28941 - protein, 9 aa, Homo sapiens
  AACR GENIE Results; TP53_p.T118Qfs*5; B1402
FLHSGQPSL

SEQ ID NO: 28942 - protein, 9 aa, Homo sapiens
  AACR GENIE Results; TP53_p.T118Qfs*5; B5101
FLHSGQPSL

SEQ ID NO: 28943 - protein, 9 aa, Homo sapiens
  AACR GENIE Results; TP53_p.T125K; B1501
TAKSVTCKY

SEQ ID NO: 28944 - protein, 10 aa, Homo sapiens
  AACR GENIE Results; TP53_p.T125K; A2402
KYSPALNKMF

SEQ ID NO: 28945 - protein, 9 aa, Homo sapiens
  AACR GENIE Results; TP53_p.T125K; A1101
GTAKSVTCK

SEQ ID NO: 28946 - protein, 9 aa, Homo sapiens
  AACR GENIE Results; TP53_p.T125K; C0202
TAKSVTCKY

SEQ ID NO: 28947 - protein, 9 aa, Homo sapiens
  AACR GENIE Results; TP53_p.T125K; A2402
KYSPALNKM

SEQ ID NO: 28948 - protein, 9 aa, Homo sapiens
  AACR GENIE Results; TP53_p.T125K; A0301
GTAKSVTCK

SEQ ID NO: 28949 - protein, 9 aa, Homo sapiens
  AACR GENIE Results; TP53_p.T125K; B3501
TAKSVTCKY

SEQ ID NO: 28950 - protein, 10 aa, Homo sapiens
  AACR GENIE Results; TP53_p.T125K; A0301
TCKYSPALNK

SEQ ID NO: 28951 - protein, 9 aa, Homo sapiens
  AACR GENIE Results; TP53_p.T125K; C0602
KYSPALNKM

SEQ ID NO: 28952 - protein, 10 aa, Homo sapiens
  AACR GENIE Results; TP53_p.T125K; B1501
GTAKSVTCKY

SEQ ID NO: 28953 - protein, 9 aa, Homo sapiens
  AACR GENIE Results; TP53_p.T125K; A2601
TAKSVTCKY

SEQ ID NO: 28954 - protein, 10 aa, Homo sapiens
  AACR GENIE Results; TP53_p.T125K; A0301
GTAKSVTCKY

SEQ ID NO: 28955 - protein, 10 aa, Homo sapiens
  AACR GENIE Results; TP53_p.T125K; A2601
GTAKSVTCKY

SEQ ID NO: 28956 - protein, 9 aa, Homo sapiens
  AACR GENIE Results; TP53_p.T140Pfs*30; B5501
IPHPRPAPA

SEQ ID NO: 28957 - protein, 9 aa, Homo sapiens
  AACR GENIE Results; TP53_p.T140Pfs*30; B5501
HPRPAPASA

SEQ ID NO: 28958 - protein, 8 aa, Homo sapiens
  AACR GENIE Results; TP53_p.T140Pfs*30; B5501
IPHPRPAP

SEQ ID NO: 28959 - protein, 9 aa, Homo sapiens
  AACR GENIE Results; TP53_p.T140Pfs*30; B0702
APWPSTSSH

SEQ ID NO: 28960 - protein, 9 aa, Homo sapiens
  AACR GENIE Results; TP53_p.T140Pfs*30; A3303
SCGLIPHPR

SEQ ID NO: 28961 - protein, 9 aa, Homo sapiens
  AACR GENIE Results; TP53_p.T140Pfs*30; B0702
HPRPAPASA

SEQ ID NO: 28962 - protein, 9 aa, Homo sapiens
  AACR GENIE Results; TP53_p.T140Pfs*30; B0801
IPHPRPAPA

SEQ ID NO: 28963 - protein, 9 aa, Homo sapiens
  AACR GENIE Results; TP53_p.T140Pfs*30; A0201
GLIPHPRPA

SEQ ID NO: 28964 - protein, 10 aa, Homo sapiens
  AACR GENIE Results; TP53_p.T140Pfs*30; A0201
LIPHPRPAPA

SEQ ID NO: 28965 - protein, 9 aa, Homo sapiens
  AACR GENIE Results; TP53_p.T140Pfs*30; B3501
APWPSTSSH

SEQ ID NO: 28966 - protein, 9 aa, Homo sapiens
  AACR GENIE Results; TP53_p.T140Pfs*30; B0702
IPHPRPAPA

SEQ ID NO: 28967 - protein, 9 aa, Homo sapiens
  AACR GENIE Results; TP53_p.T140Pfs*30; A3101
SCGLIPHPR

SEQ ID NO: 28968 - protein, 8 aa, Homo sapiens
  AACR GENIE Results; TP53_p.T140Pfs*30; B0702
IPHPRPAP

SEQ ID NO: 28969 - protein, 9 aa, Homo sapiens
  AACR GENIE Results; TP53_p.T140Pfs*30; A0201
IPHPRPAPA

SEQ ID NO: 28970 - protein, 11 aa, Homo sapiens
  AACR GENIE Results; TP53_p.T140Pfs*30; B3501
APWPSTSSHST

SEQ ID NO: 28971 - protein, 8 aa, Homo sapiens
  AACR GENIE Results; TP53_p.T155I; B5101
TPPPGIRV

SEQ ID NO: 28972 - protein, 10 aa, Homo sapiens
  AACR GENIE Results; TP53_p.T155I; A1101
STPPPGIRVR

SEQ ID NO: 28973 - protein, 11 aa, Homo sapiens
  AACR GENIE Results; TP53_p.T155I; A6801
DSTPPPGIRVR

SEQ ID NO: 28974 - protein, 8 aa, Homo sapiens
  AACR GENIE Results; TP53_p.T155I; B5101
DSTPPPGI

SEQ ID NO: 28975 - protein, 10 aa, Homo sapiens
  AACR GENIE Results; TP53_p.T155I; A6801
STPPPGIRVR

SEQ ID NO: 28976 - protein, 9 aa, Homo sapiens
  AACR GENIE Results; TP53_p.T155I; A6801
DSTPPPGIR

SEQ ID NO: 28977 - protein, 9 aa, Homo sapiens
  AACR GENIE Results; TP53_p.T155I; A6801
TPPPGIRVR

SEQ ID NO: 28978 - protein, 9 aa, Homo sapiens
  AACR GENIE Results; TP53_p.T155I; A1101
STPPPGIRV

SEQ ID NO: 28979 - protein, 10 aa, Homo sapiens
  AACR GENIE Results; TP53_p.T155I; A6801
DSTPPPGIRV

SEQ ID NO: 28980 - protein, 9 aa, Homo sapiens
  AACR GENIE Results; TP53_p.T155I; B4403
VDSTPPPGI

SEQ ID NO: 28981 - protein, 8 aa, Homo sapiens
  AACR GENIE Results; TP53_p.T155P; B5101
TPPPGPRV

SEQ ID NO: 28982 - protein, 9 aa, Homo sapiens
  AACR GENIE Results; TP53_p.T155P; A0201
STPPPGPRV

SEQ ID NO: 28983 - protein, 9 aa, Homo sapiens
  AACR GENIE Results; TP53_p.T155P; A1101
STPPPGPRV

SEQ ID NO: 28984 - protein, 9 aa, Homo sapiens
  AACR GENIE Results; TP53_p.T155P; B0702
GPRVRAMAI

SEQ ID NO: 28985 - protein, 10 aa, Homo sapiens
  AACR GENIE Results; TP53_p.T155P; A1101
STPPPGPRVR

SEQ ID NO: 28986 - protein, 9 aa, Homo sapiens
  AACR GENIE Results; TP53_p.T211I; A2301
EYLDDRNIF

SEQ ID NO: 28987 - protein, 9 aa, Homo sapiens
  AACR GENIE Results; TP53_p.T211I; A2402
EYLDDRNIF

SEQ ID NO: 28988 - protein, 8 aa, Homo sapiens
  AACR GENIE Results; TP53_p.T211I; C0501
YLDDRNIF

SEQ ID NO: 28989 - protein, 9 aa, Homo sapiens
  AACR GENIE Results; TP53_p.T211I; B1402
DRNIFRHSV

SEQ ID NO: 28990 - protein, 10 aa, Homo sapiens
  AACR GENIE Results; TP53_p.T211I; B4403
VEYLDDRNIF

SEQ ID NO: 28991 - protein, 9 aa, Homo sapiens
  AACR GENIE Results; TP53_p.T211I; A0201
YLDDRNIFR

SEQ ID NO: 28992 - protein, 8 aa, Homo sapiens
  AACR GENIE Results; TP53_p.T211I; C0802
YLDDRNIF

SEQ ID NO: 28993 - protein, 8 aa, Homo sapiens
  AACR GENIE Results; TP53_p.T211I; C0401
YLDDRNIF

SEQ ID NO: 28994 - protein, 9 aa, Homo sapiens
  AACR GENIE Results; TP53_p.T211I; C1502
RNIFRHSVV

SEQ ID NO: 28995 - protein, 10 aa, Homo sapiens
  AACR GENIE Results; TP53_p.T211I; A2301
VEYLDDRNIF

SEQ ID NO: 28996 - protein, 10 aa, Homo sapiens
  AACR GENIE Results; TP53_p.T211I; A3101
EYLDDRNIFR

SEQ ID NO: 28997 - protein, 8 aa, Homo sapiens
  AACR GENIE Results; TP53_p.V122Dfs*26; C0102
VLPTGQDL

SEQ ID NO: 28998 - protein, 9 aa, Homo sapiens
  AACR GENIE Results; TP53_p.V122Dfs*26; B3501
LPCPQQDVL

SEQ ID NO: 28999 - protein, 11 aa, Homo sapiens
  AACR GENIE Results; TP53_p.V122Dfs*26; A0201
VLPTGQDLPCA

SEQ ID NO: 29000 - protein, 9 aa, Homo sapiens
  AACR GENIE Results; TP53_p.V122Dfs*26; C1203
TAKSDLHVL

SEQ ID NO: 29001 - protein, 9 aa, Homo sapiens
  AACR GENIE Results; TP53_p.V122Dfs*26; B3501
LPTGQDLPC

SEQ ID NO: 29002 - protein, 9 aa, Homo sapiens
  AACR GENIE Results; TP53_p.V122Dfs*26; C1601
TAKSDLHVL

SEQ ID NO: 29003 - protein, 9 aa, Homo sapiens
  AACR GENIE Results; TP53_p.V122Dfs*26; B0801
TAKSDLHVL

SEQ ID NO: 29004 - protein, 9 aa, Homo sapiens
  AACR GENIE Results; TP53_p.V122Dfs*26; C0202
TAKSDLHVL

SEQ ID NO: 29005 - protein, 9 aa, Homo sapiens
  AACR GENIE Results; TP53_p.V122Dfs*26; B0702
LPCPQQDVL

SEQ ID NO: 29006 - protein, 8 aa, Homo sapiens
  AACR GENIE Results; TP53_p.V143A; B5701
KTCPAQLW

SEQ ID NO: 29007 - protein, 9 aa, Homo sapiens
  AACR GENIE Results; TP53_p.V143A; C1502
KTCPAQLWV

SEQ ID NO: 29008 - protein, 8 aa, Homo sapiens
  AACR GENIE Results; TP53_p.V143M; B5701
KTCPMQLW

SEQ ID NO: 29009 - protein, 10 aa, Homo sapiens
  AACR GENIE Results; TP53_p.V157A; A1101
STPPPGTRAR

SEQ ID NO: 29010 - protein, 11 aa, Homo sapiens
  AACR GENIE Results; TP53_p.V157A; A6801
DSTPPPGTRAR

SEQ ID NO: 29011 - protein, 10 aa, Homo sapiens
  AACR GENIE Results; TP53_p.V157A; A6801
STPPPGTRAR

SEQ ID NO: 29012 - protein, 9 aa, Homo sapiens
  AACR GENIE Results; TP53_p.V157A; A0301
RARAMAIYK

SEQ ID NO: 29013 - protein, 10 aa, Homo sapiens
  AACR GENIE Results; TP53_p.V157A; A3101
STPPPGTRAR

SEQ ID NO: 29014 - protein, 9 aa, Homo sapiens
  AACR GENIE Results; TP53_p.V157F; A2601
STPPPGTRF

SEQ ID NO: 29015 - protein, 9 aa, Homo sapiens
  AACR GENIE Results; TP53_p.V157F; B1501
STPPPGTRF

SEQ ID NO: 29016 - protein, 9 aa, Homo sapiens
  AACR GENIE Results; TP53_p.V157F; B5801
STPPPGTRF

SEQ ID NO: 29017 - protein, 9 aa, Homo sapiens
  AACR GENIE Results; TP53_p.V157F; A1101
STPPPGTRF

SEQ ID NO: 29018 - protein, 9 aa, Homo sapiens
  AACR GENIE Results; TP53_p.V157F; C0202
STPPPGTRF

SEQ ID NO: 29019 - protein, 9 aa, Homo sapiens
  AACR GENIE Results; TP53_p.V157F; B5701
STPPPGTRF

SEQ ID NO: 29020 - protein, 11 aa, Homo sapiens
  AACR GENIE Results; TP53_p.V157F; A3301
DSTPPPGTRFR

SEQ ID NO: 29021 - protein, 8 aa, Homo sapiens
  AACR GENIE Results; TP53_p.V157F; B3501
TPPPGTRF

SEQ ID NO: 29022 - protein, 9 aa, Homo sapiens
  AACR GENIE Results; TP53_p.V157F; B0702
STPPPGTRF

SEQ ID NO: 29023 - protein, 9 aa, Homo sapiens
  AACR GENIE Results; TP53_p.V157F; B3901
STPPPGTRF

SEQ ID NO: 29024 - protein, 10 aa, Homo sapiens
  AACR GENIE Results; TP53_p.V157F; A3101
STPPPGTRFR

SEQ ID NO: 29025 - protein, 8 aa, Homo sapiens
  AACR GENIE Results; TP53_p.V157F; B0702
TPPPGTRF

SEQ ID NO: 29026 - protein, 10 aa, Homo sapiens
  AACR GENIE Results; TP53_p.V157F; A6801
DSTPPPGTRF

SEQ ID NO: 29027 - protein, 11 aa, Homo sapiens
  AACR GENIE Results; TP53_p.V157F; A2301
VDSTPPPGTRF

SEQ ID NO: 29028 - protein, 8 aa, Homo sapiens
  AACR GENIE Results; TP53_p.V157F; B5101
TPPPGTRF

SEQ ID NO: 29029 - protein, 9 aa, Homo sapiens
  AACR GENIE Results; TP53_p.V157F; C0102
STPPPGTRF

SEQ ID NO: 29030 - protein, 8 aa, Homo sapiens
  AACR GENIE Results; TP53_p.V172D; B1302
SQHMTEDV

SEQ ID NO: 29031 - protein, 9 aa, Homo sapiens
  AACR GENIE Results; TP53_p.V172F; B1501
KQSQHMTEF

SEQ ID NO: 29032 - protein, 11 aa, Homo sapiens
  AACR GENIE Results; TP53_p.V172F; A2402
IYKQSQHMTEF

SEQ ID NO: 29033 - protein, 9 aa, Homo sapiens
  AACR GENIE Results; TP53_p.V172F; A3201
KQSQHMTEF

SEQ ID NO: 29034 - protein, 11 aa, Homo sapiens
  AACR GENIE Results; TP53_p.V172F; A2301
IYKQSQHMTEF

SEQ ID NO: 29035 - protein, 9 aa, Homo sapiens
  AACR GENIE Results; TP53_p.V172F; C0202
KQSQHMTEF

SEQ ID NO: 29036 - protein, 9 aa, Homo sapiens
  AACR GENIE Results; TP53_p.V172F; A3101
SQHMTEFVR

SEQ ID NO: 29037 - protein, 11 aa, Homo sapiens
  AACR GENIE Results; TP53_p.V172F; A3101
QSQHMTEFVRR

SEQ ID NO: 29038 - protein, 8 aa, Homo sapiens
  AACR GENIE Results; TP53_p.V172F; A3101
HMTEFVRR

SEQ ID NO: 29039 - protein, 9 aa, Homo sapiens
  AACR GENIE Results; TP53_p.V173G; A3101
SQHMTEVGR

SEQ ID NO: 29040 - protein, 10 aa, Homo sapiens
  AACR GENIE Results; TP53_p.V173G; A3101
QSQHMTEVGR

SEQ ID NO: 29041 - protein, 10 aa, Homo sapiens
  AACR GENIE Results; TP53_p.V173G; A6801
QSQHMTEVGR

SEQ ID NO: 29042 - protein, 9 aa, Homo sapiens
  AACR GENIE Results; TP53_p.V173G; B1501
SQHMTEVGR

SEQ ID NO: 29043 - protein, 9 aa, Homo sapiens
  AACR GENIE Results; TP53_p.V173G; B1302
SQHMTEVGR

SEQ ID NO: 29044 - protein, 8 aa, Homo sapiens
  AACR GENIE Results; TP53_p.V173L; B1501
SQHMTEVL

SEQ ID NO: 29045 - protein, 9 aa, Homo sapiens
  AACR GENIE Results; TP53_p.V173L; A3101
SQHMTEVLR

SEQ ID NO: 29046 - protein, 10 aa, Homo sapiens
  AACR GENIE Results; TP53_p.V173L; A6801
QSQHMTEVLR

SEQ ID NO: 29047 - protein, 10 aa, Homo sapiens
  AACR GENIE Results; TP53_p.V173L; A3101
QSQHMTEVLR

SEQ ID NO: 29048 - protein, 8 aa, Homo sapiens
  AACR GENIE Results; TP53_p.V173L; B3901
SQHMTEVL

SEQ ID NO: 29049 - protein, 8 aa, Homo sapiens
  AACR GENIE Results; TP53_p.V173L; B1302
SQHMTEVL

SEQ ID NO: 29050 - protein, 8 aa, Homo sapiens
  AACR GENIE Results; TP53_p.V173L; B4002
SQHMTEVL

SEQ ID NO: 29051 - protein, 10 aa, Homo sapiens
  AACR GENIE Results; TP53_p.V173L; A3303
QSQHMTEVLR

SEQ ID NO: 29052 - protein, 8 aa, Homo sapiens
  AACR GENIE Results; TP53_p.V173L; B1402
SQHMTEVL

SEQ ID NO: 29053 - protein, 8 aa, Homo sapiens
  AACR GENIE Results; TP53_p.V173L; B3801
SQHMTEVL

SEQ ID NO: 29054 - protein, 8 aa, Homo sapiens
  AACR GENIE Results; TP53_p.V173M; B1501
SQHMTEVM

SEQ ID NO: 29055 - protein, 8 aa, Homo sapiens
  AACR GENIE Results; TP53_p.V173M; B1502
SQHMTEVM

SEQ ID NO: 29056 - protein, 8 aa, Homo sapiens
  AACR GENIE Results; TP53_p.V173M; B1503
SQHMTEVM

SEQ ID NO: 29057 - protein, 9 aa, Homo sapiens
  AACR GENIE Results; TP53_p.V173M; A3101
SQHMTEVMR

SEQ ID NO: 29058 - protein, 8 aa, Homo sapiens
  AACR GENIE Results; TP53_p.V173M; B3901
SQHMTEVM

SEQ ID NO: 29059 - protein, 8 aa, Homo sapiens
  AACR GENIE Results; TP53_p.V173M; C0801
SQHMTEVM

SEQ ID NO: 29060 - protein, 8 aa, Homo sapiens
  AACR GENIE Results; TP53_p.V173M; B1510
SQHMTEVM

SEQ ID NO: 29061 - protein, 8 aa, Homo sapiens
  AACR GENIE Results; TP53_p.V173M; B1302
SQHMTEVM

SEQ ID NO: 29062 - protein, 8 aa, Homo sapiens
  AACR GENIE Results; TP53_p.V173M; B3906
SQHMTEVM

SEQ ID NO: 29063 - protein, 10 aa, Homo sapiens
  AACR GENIE Results; TP53_p.V173M; A6801
QSQHMTEVMR

SEQ ID NO: 29064 - protein, 8 aa, Homo sapiens
  AACR GENIE Results; TP53_p.V173M; B3501
SQHMTEVM

SEQ ID NO: 29065 - protein, 9 aa, Homo sapiens
  AACR GENIE Results; TP53_p.V197M; B4403
MEGNLRVEY

SEQ ID NO: 29066 - protein, 9 aa, Homo sapiens
  AACR GENIE Results; TP53_p.V197M; B1801
MEGNLRVEY

SEQ ID NO: 29067 - protein, 9 aa, Homo sapiens
  AACR GENIE Results; TP53_p.V197M; B4402
MEGNLRVEY

SEQ ID NO: 29068 - protein, 9 aa, Homo sapiens
  AACR GENIE Results; TP53_p.V197M; B0702
APPQHLIRM

SEQ ID NO: 29069 - protein, 9 aa, Homo sapiens
  AACR GENIE Results; TP53_p.V197M; B1501
MEGNLRVEY

SEQ ID NO: 29070 - protein, 9 aa, Homo sapiens
  AACR GENIE Results; TP53_p.V197M; B3501
MEGNLRVEY

SEQ ID NO: 29071 - protein, 10 aa, Homo sapiens
  AACR GENIE Results; TP53_p.V197M; B1501
RMEGNLRVEY

SEQ ID NO: 29072 - protein, 9 aa, Homo sapiens
  AACR GENIE Results; TP53_p.V197M; C0602
IRMEGNLRV

SEQ ID NO: 29073 - protein, 10 aa, Homo sapiens
  AACR GENIE Results; TP53_p.V197M; B5701
RMEGNLRVEY

SEQ ID NO: 29074 - protein, 9 aa, Homo sapiens
  AACR GENIE Results; TP53_p.V197M; B4001
MEGNLRVEY

SEQ ID NO: 29075 - protein, 9 aa, Homo sapiens
  AACR GENIE Results; TP53_p.V203L; B4403
VEGNLRLEY

SEQ ID NO: 29076 - protein, 9 aa, Homo sapiens
  AACR GENIE Results; TP53_p.V203L; B1801
VEGNLRLEY

SEQ ID NO: 29077 - protein, 9 aa, Homo sapiens
  AACR GENIE Results; TP53_p.V203L; B4402
VEGNLRLEY

SEQ ID NO: 29078 - protein, 9 aa, Homo sapiens
  AACR GENIE Results; TP53_p.V203L; A2301
VEGNLRLEY

SEQ ID NO: 29079 - protein, 10 aa, Homo sapiens
  AACR GENIE Results; TP53_p.V203L; B4403
LEYLDDRNTF

SEQ ID NO: 29080 - protein, 10 aa, Homo sapiens
  AACR GENIE Results; TP53_p.V203L; B1801
LEYLDDRNTF

SEQ ID NO: 29081 - protein, 9 aa, Homo sapiens
  AACR GENIE Results; TP53_p.V203L; B2705
IRVEGNLRL

SEQ ID NO: 29082 - protein, 10 aa, Homo sapiens
  AACR GENIE Results; TP53_p.V203L; B4901
LEYLDDRNTF

SEQ ID NO: 29083 - protein, 10 aa, Homo sapiens
  AACR GENIE Results; TP53_p.V203L; B4001
LEYLDDRNTF

SEQ ID NO: 29084 - protein, 10 aa, Homo sapiens
  AACR GENIE Results; TP53_p.V203L; A3001
LEYLDDRNTF

SEQ ID NO: 29085 - protein, 10 aa, Homo sapiens
  AACR GENIE Results; TP53_p.V203L; A2301
LEYLDDRNTF

SEQ ID NO: 29086 - protein, 8 aa, Homo sapiens
  AACR GENIE Results; TP53_p.V203L; C1601
EGNLRLEY

SEQ ID NO: 29087 - protein, 10 aa, Homo sapiens
  AACR GENIE Results; TP53_p.V203L; B4402
LEYLDDRNTF

SEQ ID NO: 29088 - protein, 10 aa, Homo sapiens
  AACR GENIE Results; TP53_p.V203L; A2902
RVEGNLRLEY

SEQ ID NO: 29089 - protein, 8 aa, Homo sapiens
  AACR GENIE Results; TP53_p.V203L; B0801
EGNLRLEY

SEQ ID NO: 29090 - protein, 9 aa, Homo sapiens
  AACR GENIE Results; TP53_p.V203L; B1501
VEGNLRLEY

SEQ ID NO: 29091 - protein, 10 aa, Homo sapiens
  AACR GENIE Results; TP53_p.V203L; A0101
RVEGNLRLEY

SEQ ID NO: 29092 - protein, 10 aa, Homo sapiens
  AACR GENIE Results; TP53_p.V203L; B5701
RVEGNLRLEY

SEQ ID NO: 29093 - protein, 9 aa, Homo sapiens
  AACR GENIE Results; TP53_p.V203L; A2902
VEGNLRLEY

SEQ ID NO: 29094 - protein, 10 aa, Homo sapiens
  AACR GENIE Results; TP53_p.V203L; B5701
LEYLDDRNTF

SEQ ID NO: 29095 - protein, 10 aa, Homo sapiens
  AACR GENIE Results; TP53_p.V216G; A0201
GVVPYEPPEV

SEQ ID NO: 29096 - protein, 9 aa, Homo sapiens
  AACR GENIE Results; TP53_p.V216G; C0702
FRHSGVVPY

SEQ ID NO: 29097 - protein, 9 aa, Homo sapiens
  AACR GENIE Results; TP53_p.V216G; B2705
FRHSGVVPY

SEQ ID NO: 29098 - protein, 10 aa, Homo sapiens
  AACR GENIE Results; TP53_p.V216G; A3001
GVVPYEPPEV

SEQ ID NO: 29099 - protein, 9 aa, Homo sapiens
  AACR GENIE Results; TP53_p.V216L; B1402
DRNTFRHSL

SEQ ID NO: 29100 - protein, 9 aa, Homo sapiens
  AACR GENIE Results; TP53_p.V216L; C1502
NTFRHSLVV

SEQ ID NO: 29101 - protein, 9 aa, Homo sapiens
  AACR GENIE Results; TP53_p.V216L; A6802
NTFRHSLVV

SEQ ID NO: 29102 - protein, 10 aa, Homo sapiens
  AACR GENIE Results; TP53_p.V216L; A6802
LVVPYEPPEV

SEQ ID NO: 29103 - protein, 10 aa, Homo sapiens
  AACR GENIE Results; TP53_p.V216L; A0201
LVVPYEPPEV

SEQ ID NO: 29104 - protein, 9 aa, Homo sapiens
  AACR GENIE Results; TP53_p.V216L; C0702
FRHSLVVPY

SEQ ID NO: 29105 - protein, 10 aa, Homo sapiens
  AACR GENIE Results; TP53_p.V216L; B5001
LVVPYEPPEV

SEQ ID NO: 29106 - protein, 9 aa, Homo sapiens
  AACR GENIE Results; TP53_p.V216L; C1502
RNTFRHSLV

SEQ ID NO: 29107 - protein, 10 aa, Homo sapiens
  AACR GENIE Results; TP53_p.V216M; A6802
MVVPYEPPEV

SEQ ID NO: 29108 - protein, 10 aa, Homo sapiens
  AACR GENIE Results; TP53_p.V216M; A0201
MVVPYEPPEV

SEQ ID NO: 29109 - protein, 10 aa, Homo sapiens
  AACR GENIE Results; TP53_p.V216M; A0205
MVVPYEPPEV

SEQ ID NO: 29110 - protein, 9 aa, Homo sapiens
  AACR GENIE Results; TP53_p.V216M; B1402
DRNTFRHSM

SEQ ID NO: 29111 - protein, 9 aa, Homo sapiens
  AACR GENIE Results; TP53_p.V216M; B1401
DRNTFRHSM

SEQ ID NO: 29112 - protein, 9 aa, Homo sapiens
  AACR GENIE Results; TP53_p.V216M; A6802
NTFRHSMVV

SEQ ID NO: 29113 - protein, 10 aa, Homo sapiens
  AACR GENIE Results; TP53_p.V216M; B3503
MVVPYEPPEV

SEQ ID NO: 29114 - protein, 9 aa, Homo sapiens
  AACR GENIE Results; TP53_p.V216M; C1502
NTFRHSMVV

SEQ ID NO: 29115 - protein, 10 aa, Homo sapiens
  AACR GENIE Results; TP53_p.V216M; B5001
MVVPYEPPEV

SEQ ID NO: 29116 - protein, 10 aa, Homo sapiens
  AACR GENIE Results; TP53_p.V216M; B3502
MVVPYEPPEV

SEQ ID NO: 29117 - protein, 9 aa, Homo sapiens
  AACR GENIE Results; TP53_p.V216M; C1203
NTFRHSMVV

SEQ ID NO: 29118 - protein, 9 aa, Homo sapiens
  AACR GENIE Results; TP53_p.V218Cfs*29; B5801
TTCVTVPAW

SEQ ID NO: 29119 - protein, 9 aa, Homo sapiens
  AACR GENIE Results; TP53_p.V218Cfs*29; B5701
TTCVTVPAW

SEQ ID NO: 29120 - protein, 9 aa, Homo sapiens
  AACR GENIE Results; TP53_p.V218Cfs*29; A6801
HSVVCPMSR

SEQ ID NO: 29121 - protein, 9 aa, Homo sapiens
  AACR GENIE Results; TP53_p.V218Cfs*29; A6802
STTTTCVTV

SEQ ID NO: 29122 - protein, 11 aa, Homo sapiens
  AACR GENIE Results; TP53_p.V218Cfs*29; A6802
TVPPSTTTTCV

SEQ ID NO: 29123 - protein, 9 aa, Homo sapiens
  AACR GENIE Results; TP53_p.V218Cfs*29; B5101
VPPSTTTTC

SEQ ID NO: 29124 - protein, 9 aa, Homo sapiens
  AACR GENIE Results; TP53_p.V218Cfs*29; A3303
HSVVCPMSR

SEQ ID NO: 29125 - protein, 10 aa, Homo sapiens
  AACR GENIE Results; TP53_p.V218Cfs*29; B5101
VPPSTTTTCV

SEQ ID NO: 29126 - protein, 10 aa, Homo sapiens
  AACR GENIE Results; TP53_p.V218Cfs*29; B0702
VPPSTTTTCV

SEQ ID NO: 29127 - protein, 9 aa, Homo sapiens
  AACR GENIE Results; TP53_p.V218Cfs*29; B5801
STTTTCVTV

SEQ ID NO: 29128 - protein, 9 aa, Homo sapiens
  AACR GENIE Results; TP53_p.V218Cfs*29; B5801
LTVPPSTTT

SEQ ID NO: 29129 - protein, 9 aa, Homo sapiens
  AACR GENIE Results; TP53_p.V218Cfs*29; A6802
SVVCPMSRL

SEQ ID NO: 29130 - protein, 8 aa, Homo sapiens
  AACR GENIE Results; TP53_p.V218Cfs*29; B5101
VPPSTTTT

SEQ ID NO: 29131 - protein, 9 aa, Homo sapiens
  AACR GENIE Results; TP53_p.V218Cfs*29; C1502
STTTTCVTV

SEQ ID NO: 29132 - protein, 9 aa, Homo sapiens
  AACR GENIE Results; TP53_p.V272L; B2705
GRNSFELRV

SEQ ID NO: 29133 - protein, 9 aa, Homo sapiens
  AACR GENIE Results; TP53_p.V272L; C0602
GRNSFELRV

SEQ ID NO: 29134 - protein, 8 aa, Homo sapiens
  AACR GENIE Results; TP53_p.V272L; C1502
RNSFELRV

SEQ ID NO: 29135 - protein, 9 aa, Homo sapiens
  AACR GENIE Results; TP53_p.V272L; A3101
LGRNSFELR

SEQ ID NO: 29136 - protein, 9 aa, Homo sapiens
  AACR GENIE Results; TP53_p.V272M; B2705
GRNSFEMRV

SEQ ID NO: 29137 - protein, 9 aa, Homo sapiens
  AACR GENIE Results; TP53_p.V272M; C0602
GRNSFEMRV

SEQ ID NO: 29138 - protein, 9 aa, Homo sapiens
  AACR GENIE Results; TP53_p.V274A; B2705
GRNSFEVRA

SEQ ID NO: 29139 - protein, 9 aa, Homo sapiens
  AACR GENIE Results; TP53_p.V274F; B2705
GRNSFEVRF

SEQ ID NO: 29140 - protein, 9 aa, Homo sapiens
  AACR GENIE Results; TP53_p.V274F; B2702
GRNSFEVRF

SEQ ID NO: 29141 - protein, 9 aa, Homo sapiens
  AACR GENIE Results; TP53_p.V274F; C0602
GRNSFEVRF

SEQ ID NO: 29142 - protein, 9 aa, Homo sapiens
  AACR GENIE Results; TP53_p.V274F; C0702
GRNSFEVRF

SEQ ID NO: 29143 - protein, 9 aa, Homo sapiens
  AACR GENIE Results; TP53_p.V274F; C0701
GRNSFEVRF

SEQ ID NO: 29144 - protein, 9 aa, Homo sapiens
  AACR GENIE Results; TP53_p.V274L; B2705
GRNSFEVRL

SEQ ID NO: 29145 - protein, 9 aa, Homo sapiens
  AACR GENIE Results; TP53_p.V274L; C0602
GRNSFEVRL

SEQ ID NO: 29146 - protein, 9 aa, Homo sapiens
  AACR GENIE Results; TP53_p.V274L; C0701
GRNSFEVRL

SEQ ID NO: 29147 - protein, 9 aa, Homo sapiens
  AACR GENIE Results; TP53_p.V274L; B2702
GRNSFEVRL

SEQ ID NO: 29148 - protein, 9 aa, Homo sapiens
  AACR GENIE Results; TP53_p.V73Afs*51; C0304
SCILGQPSL

SEQ ID NO: 29149 - protein, 9 aa, Homo sapiens
  AACR GENIE Results; TP53_p.V73Afs*51; B1501
SCILGQPSL

SEQ ID NO: 29150 - protein, 9 aa, Homo sapiens
  AACR GENIE Results; TP53_p.V73Afs*51; B0702
LPRKPTRAA

SEQ ID NO: 29151 - protein, 9 aa, Homo sapiens
  AACR GENIE Results; TP53_p.V73Afs*51; B0702
SCILGQPSL

SEQ ID NO: 29152 - protein, 10 aa, Homo sapiens
  AACR GENIE Results; TP53_p.V73Afs*51; A1101
ASCILGQPSL

SEQ ID NO: 29153 - protein, 9 aa, Homo sapiens
  AACR GENIE Results; TP53_p.V73Afs*51; A0201
SCILGQPSL

SEQ ID NO: 29154 - protein, 9 aa, Homo sapiens
  AACR GENIE Results; TP53_p.V73Afs*51; B0801
SCILGQPSL

SEQ ID NO: 29155 - protein, 11 aa, Homo sapiens
  AACR GENIE Results; TP53_p.V73Afs*51; B0702
LPRKPTRAATV

SEQ ID NO: 29156 - protein, 9 aa, Homo sapiens
  AACR GENIE Results; TP53_p.V73Afs*51; B3501
SCILGQPSL

SEQ ID NO: 29157 - protein, 9 aa, Homo sapiens
  AACR GENIE Results; TP53_p.V73Rfs*76; B3503
LPCPQQDVL

SEQ ID NO: 29158 - protein, 9 aa, Homo sapiens
  AACR GENIE Results; TP53_p.V73Rfs*76; C1402
RFPSGLLAF

SEQ ID NO: 29159 - protein, 8 aa, Homo sapiens
  AACR GENIE Results; TP53_p.V73Rfs*76; C0102
VLPTGQDL

SEQ ID NO: 29160 - protein, 9 aa, Homo sapiens
  AACR GENIE Results; TP53_p.V73Rfs*76; B3503
FPENLPGQL

SEQ ID NO: 29161 - protein, 9 aa, Homo sapiens
  AACR GENIE Results; TP53_p.V73Rfs*76; B3503
LPTGQDLPC

SEQ ID NO: 29162 - protein, 8 aa, Homo sapiens
  AACR GENIE Results; TP53_p.V73Rfs*76; B5101
SPLLAPVI

SEQ ID NO: 29163 - protein, 9 aa, Homo sapiens
  AACR GENIE Results; TP53_p.V73Rfs*76; B3501
SPLLAPVIF

SEQ ID NO: 29164 - protein, 9 aa, Homo sapiens
  AACR GENIE Results; TP53_p.V73Rfs*76; B3501
LPCPQQDVL

SEQ ID NO: 29165 - protein, 9 aa, Homo sapiens
  AACR GENIE Results; TP53_p.V73Rfs*76; C0401
FWDSQVCDL

SEQ ID NO: 29166 - protein, 9 aa, Homo sapiens
  AACR GENIE Results; TP53_p.V73Rfs*76; A2301
RFPSGLLAF

SEQ ID NO: 29167 - protein, 11 aa, Homo sapiens
  AACR GENIE Results; TP53_p.V73Rfs*76; B3501
FPENLPGQLRF

SEQ ID NO: 29168 - protein, 11 aa, Homo sapiens
  AACR GENIE Results; TP53_p.V73Rfs*76; A0201
VLPTGQDLPCA

SEQ ID NO: 29169 - protein, 11 aa, Homo sapiens
  AACR GENIE Results; TP53_p.V73Rfs*76; B3503
CPFPENLPGQL

SEQ ID NO: 29170 - protein, 9 aa, Homo sapiens
  AACR GENIE Results; TP53_p.V73Rfs*76; B1302
GQLRFPSGL

SEQ ID NO: 29171 - protein, 9 aa, Homo sapiens
  AACR GENIE Results; TP53_p.V73Rfs*76; B3501
FPENLPGQL

SEQ ID NO: 29172 - protein, 9 aa, Homo sapiens
  AACR GENIE Results; TP53_p.V73Rfs*76; C0401
FPENLPGQL

SEQ ID NO: 29173 - protein, 9 aa, Homo sapiens
  AACR GENIE Results; TP53_p.V73Rfs*76; A2402
RFPSGLLAF

SEQ ID NO: 29174 - protein, 10 aa, Homo sapiens
  AACR GENIE Results; TP53_p.V73Rfs*76; C0602
LRFPSGLLAF

SEQ ID NO: 29175 - protein, 9 aa, Homo sapiens
  AACR GENIE Results; TP53_p.V73Rfs*76; C0102
RFPSGLLAF

SEQ ID NO: 29176 - protein, 9 aa, Homo sapiens
  AACR GENIE Results; TP53_p.V73Rfs*76; B3501
LPTGQDLPC

SEQ ID NO: 29177 - protein, 8 aa, Homo sapiens
  AACR GENIE Results; TP53_p.V73Rfs*76; A3303
ENLPGQLR

SEQ ID NO: 29178 - protein, 10 aa, Homo sapiens
  AACR GENIE Results; TP53_p.V73Rfs*76; B5501
LPTGQDLPCA

SEQ ID NO: 29179 - protein, 9 aa, Homo sapiens
  AACR GENIE Results; TP53_p.V73Rfs*76; B3503
SPLLAPVIF

SEQ ID NO: 29180 - protein, 9 aa, Homo sapiens
  AACR GENIE Results; TP53_p.V73Rfs*76; B3503
TGGPCTSPL

SEQ ID NO: 29181 - protein, 9 aa, Homo sapiens
  AACR GENIE Results; TP53_p.V73Rfs*76; B1302
GQDLPCAAV

SEQ ID NO: 29182 - protein, 10 aa, Homo sapiens
  AACR GENIE Results; TP53_p.V73Rfs*76; A2301
RFPSGLLAFW

SEQ ID NO: 29183 - protein, 10 aa, Homo sapiens
  AACR GENIE Results; TP53_p.V73Rfs*76; A2402
RFPSGLLAFW

SEQ ID NO: 29184 - protein, 8 aa, Homo sapiens
  AACR GENIE Results; TP53_p.V73Rfs*76; B5501
SPLLAPVI

SEQ ID NO: 29185 - protein, 10 aa, Homo sapiens
  AACR GENIE Results; TP53_p.V73Rfs*76; B2702
LRFPSGLLAF

SEQ ID NO: 29186 - protein, 9 aa, Homo sapiens
  AACR GENIE Results; TP53_p.V73Rfs*76; C0802
FWDSQVCDL

SEQ ID NO: 29187 - protein, 9 aa, Homo sapiens
  AACR GENIE Results; TP53_p.V73Rfs*76; C0802
FPENLPGQL

SEQ ID NO: 29188 - protein, 9 aa, Homo sapiens
  AACR GENIE Results; TP53_p.V73Rfs*76; B5101
LPCPQQDVL

SEQ ID NO: 29189 - protein, 9 aa, Homo sapiens
  AACR GENIE Results; TP53_p.V73Rfs*76; B0702
LPCPQQDVL

SEQ ID NO: 29190 - protein, 10 aa, Homo sapiens
  AACR GENIE Results; TP53_p.V73Rfs*76; C0702
LRFPSGLLAF

SEQ ID NO: 29191 - protein, 10 aa, Homo sapiens
  AACR GENIE Results; TP53_p.V73Rfs*76; C0701
LRFPSGLLAF

SEQ ID NO: 29192 - protein, 9 aa, Homo sapiens
  AACR GENIE Results; TP53_p.V73Wfs*50; C0303
SCILGQPSL

SEQ ID NO: 29193 - protein, 9 aa, Homo sapiens
  AACR GENIE Results; TP53_p.V73Wfs*50; C0304
SCILGQPSL

SEQ ID NO: 29194 - protein, 9 aa, Homo sapiens
  AACR GENIE Results; TP53_p.V73Wfs*50; B1501
SCILGQPSL

SEQ ID NO: 29195 - protein, 9 aa, Homo sapiens
  AACR GENIE Results; TP53_p.V73Wfs*50; B0702
LPRKPTRAA

SEQ ID NO: 29196 - protein, 9 aa, Homo sapiens
  AACR GENIE Results; TP53_p.V73Wfs*50; B0702
SCILGQPSL

SEQ ID NO: 29197 - protein, 10 aa, Homo sapiens
  AACR GENIE Results; TP53_p.V73Wfs*50; A1101
ASCILGQPSL

SEQ ID NO: 29198 - protein, 9 aa, Homo sapiens
  AACR GENIE Results; TP53_p.V73Wfs*50; A0201
SCILGQPSL

SEQ ID NO: 29199 - protein, 9 aa, Homo sapiens
  AACR GENIE Results; TP53_p.V73Wfs*50; C1601
SCILGQPSL

SEQ ID NO: 29200 - protein, 9 aa, Homo sapiens
  AACR GENIE Results; TP53_p.V73Wfs*50; B0801
SCILGQPSL

SEQ ID NO: 29201 - protein, 9 aa, Homo sapiens
  AACR GENIE Results; TP53_p.V73Wfs*50; B1302
SCILGQPSL

SEQ ID NO: 29202 - protein, 11 aa, Homo sapiens
  AACR GENIE Results; TP53_p.V73Wfs*50; B0702
LPRKPTRAATV

SEQ ID NO: 29203 - protein, 9 aa, Homo sapiens
  AACR GENIE Results; TP53_p.V73Wfs*50; B4001
SCILGQPSL

SEQ ID NO: 29204 - protein, 9 aa, Homo sapiens
  AACR GENIE Results; TP53_p.V73Wfs*50; B3801
TRAATVSVW

SEQ ID NO: 29205 - protein, 9 aa, Homo sapiens
  AACR GENIE Results; TP53_p.V73Wfs*50; B3501
SCILGQPSL

SEQ ID NO: 29206 - protein, 8 aa, Homo sapiens
  AACR GENIE Results; TP53_p.V73Wfs*50; B5701
RAATVSVW

SEQ ID NO: 29207 - protein, 9 aa, Homo sapiens
  AACR GENIE Results; TP53_p.Y126C; A1101
CTCSPALNK

SEQ ID NO: 29208 - protein, 9 aa, Homo sapiens
  AACR GENIE Results; TP53_p.Y126C; A0301
CTCSPALNK

SEQ ID NO: 29209 - protein, 9 aa, Homo sapiens
  AACR GENIE Results; TP53_p.Y126C; A3001
TAKSVTCTC

SEQ ID NO: 29210 - protein, 10 aa, Homo sapiens
  AACR GENIE Results; TP53_p.Y126C; B5701
TCSPALNKMF

SEQ ID NO: 29211 - protein, 10 aa, Homo sapiens
  AACR GENIE Results; TP53_p.Y126C; A2301
TCSPALNKMF

SEQ ID NO: 29212 - protein, 10 aa, Homo sapiens
  AACR GENIE Results; TP53_p.Y126C; B4403
TCSPALNKMF

SEQ ID NO: 29213 - protein, 10 aa, Homo sapiens
  AACR GENIE Results; TP53_p.Y126C; B4402
TCSPALNKMF

SEQ ID NO: 29214 - protein, 9 aa, Homo sapiens
  AACR GENIE Results; TP53_p.Y126D; A1101
CTDSPALNK

SEQ ID NO: 29215 - protein, 9 aa, Homo sapiens
  AACR GENIE Results; TP53_p.Y126D; A0301
CTDSPALNK

SEQ ID NO: 29216 - protein, 9 aa, Homo sapiens
  AACR GENIE Results; TP53_p.Y126D; B3701
TDSPALNKM

SEQ ID NO: 29217 - protein, 8 aa, Homo sapiens
  AACR GENIE Results; TP53_p.Y126D; B5101
DSPALNKM

SEQ ID NO: 29218 - protein, 10 aa, Homo sapiens
  AACR GENIE Results; TP53_p.Y126D; B4403
TDSPALNKMF

SEQ ID NO: 29219 - protein, 10 aa, Homo sapiens
  AACR GENIE Results; TP53_p.Y126D; A1101
TCTDSPALNK

SEQ ID NO: 29220 - protein, 10 aa, Homo sapiens
  AACR GENIE Results; TP53_p.Y126D; B4402
TDSPALNKMF

SEQ ID NO: 29221 - protein, 9 aa, Homo sapiens
  AACR GENIE Results; TP53_p.Y126D; B3801
TDSPALNKM

SEQ ID NO: 29222 - protein, 8 aa, Homo sapiens
  AACR GENIE Results; TP53_p.Y126D; A1101
TDSPALNK

SEQ ID NO: 29223 - protein, 9 aa, Homo sapiens
  AACR GENIE Results; TP53_p.Y126D; C0303
VTCTDSPAL

SEQ ID NO: 29224 - protein, 10 aa, Homo sapiens
  AACR GENIE Results; TP53_p.Y126D; A0301
TCTDSPALNK

SEQ ID NO: 29225 - protein, 9 aa, Homo sapiens
  AACR GENIE Results; TP53_p.Y126D; C0304
VTCTDSPAL

SEQ ID NO: 29226 - protein, 10 aa, Homo sapiens
  AACR GENIE Results; TP53_p.Y126D; A2301
TDSPALNKMF

SEQ ID NO: 29227 - protein, 9 aa, Homo sapiens
  AACR GENIE Results; TP53_p.Y126D; B3503
VTCTDSPAL

SEQ ID NO: 29228 - protein, 10 aa, Homo sapiens
  AACR GENIE Results; TP53_p.Y126D; A6801
TCTDSPALNK

SEQ ID NO: 29229 - protein, 9 aa, Homo sapiens
  AACR GENIE Results; TP53_p.Y126D; B4002
TDSPALNKM

SEQ ID NO: 29230 - protein, 11 aa, Homo sapiens
  AACR GENIE Results; TP53_p.Y126D; A1101
VTCTDSPALNK

SEQ ID NO: 29231 - protein, 8 aa, Homo sapiens
  AACR GENIE Results; TP53_p.Y126D; B2702
TDSPALNK

SEQ ID NO: 29232 - protein, 9 aa, Homo sapiens
  AACR GENIE Results; TP53_p.Y126D; B5801
VTCTDSPAL

SEQ ID NO: 29233 - protein, 9 aa, Homo sapiens
  AACR GENIE Results; TP53_p.Y126D; B2705
CTDSPALNK

SEQ ID NO: 29234 - protein, 10 aa, Homo sapiens
  AACR GENIE Results; TP53_p.Y126D; A0101
CTDSPALNKM

SEQ ID NO: 29235 - protein, 9 aa, Homo sapiens
  AACR GENIE Results; TP53_p.Y163H; A0301
RVRAMAIHK

SEQ ID NO: 29236 - protein, 9 aa, Homo sapiens
  AACR GENIE Results; TP53_p.Y163H; B1501
AIHKQSQHM

SEQ ID NO: 29237 - protein, 9 aa, Homo sapiens
  AACR GENIE Results; TP53_p.Y205C; B0801
EGNLRVECL

SEQ ID NO: 29238 - protein, 10 aa, Homo sapiens
  AACR GENIE Results; TP53_p.Y205C; A3303
ECLDDRNTFR

SEQ ID NO: 29239 - protein, 10 aa, Homo sapiens
  AACR GENIE Results; TP53_p.Y205C; B4405
VECLDDRNTF

SEQ ID NO: 29240 - protein, 10 aa, Homo sapiens
  AACR GENIE Results; TP53_p.Y205C; A2301
VECLDDRNTF

SEQ ID NO: 29241 - protein, 9 aa, Homo sapiens
  AACR GENIE Results; TP53_p.Y205C; B1402
EGNLRVECL

SEQ ID NO: 29242 - protein, 8 aa, Homo sapiens
  AACR GENIE Results; TP53_p.Y205C; C0501
CLDDRNTF

SEQ ID NO: 29243 - protein, 9 aa, Homo sapiens
  AACR GENIE Results; TP53_p.Y205C; B5001
VEGNLRVEC

SEQ ID NO: 29244 - protein, 10 aa, Homo sapiens
  AACR GENIE Results; TP53_p.Y205C; B4002
VEGNLRVECL

SEQ ID NO: 29245 - protein, 10 aa, Homo sapiens
  AACR GENIE Results; TP53_p.Y205C; B4403
VECLDDRNTF

SEQ ID NO: 29246 - protein, 9 aa, Homo sapiens
  AACR GENIE Results; TP53_p.Y205C; B1502
ECLDDRNTF

SEQ ID NO: 29247 - protein, 9 aa, Homo sapiens
  AACR GENIE Results; TP53_p.Y205C; B4102
VEGNLRVEC

SEQ ID NO: 29248 - protein, 8 aa, Homo sapiens
  AACR GENIE Results; TP53_p.Y205F; C0501
FLDDRNTF

SEQ ID NO: 29249 - protein, 9 aa, Homo sapiens
  AACR GENIE Results; TP53_p.Y205F; B4402
VEGNLRVEF

SEQ ID NO: 29250 - protein, 9 aa, Homo sapiens
  AACR GENIE Results; TP53_p.Y205F; A2402
EFLDDRNTF

SEQ ID NO: 29251 - protein, 10 aa, Homo sapiens
  AACR GENIE Results; TP53_p.Y205F; B4402
VEFLDDRNTF

SEQ ID NO: 29252 - protein, 8 aa, Homo sapiens
  AACR GENIE Results; TP53_p.Y205F; C0401
FLDDRNTF

SEQ ID NO: 29253 - protein, 8 aa, Homo sapiens
  AACR GENIE Results; TP53_p.Y205F; B0801
EGNLRVEF

SEQ ID NO: 29254 - protein, 9 aa, Homo sapiens
  AACR GENIE Results; TP53_p.Y205F; B0801
EGNLRVEFL

SEQ ID NO: 29255 - protein, 9 aa, Homo sapiens
  AACR GENIE Results; TP53_p.Y205H; B3801
EHLDDRNTF

SEQ ID NO: 29256 - protein, 9 aa, Homo sapiens
  AACR GENIE Results; TP53_p.Y205H; B3901
EHLDDRNTF

SEQ ID NO: 29257 - protein, 10 aa, Homo sapiens
  AACR GENIE Results; TP53_p.Y205H; B4403
VEHLDDRNTF

SEQ ID NO: 29258 - protein, 9 aa, Homo sapiens
  AACR GENIE Results; TP53_p.Y205H; B0801
EGNLRVEHL

SEQ ID NO: 29259 - protein, 8 aa, Homo sapiens
  AACR GENIE Results; TP53_p.Y205H; C0501
HLDDRNTF

SEQ ID NO: 29260 - protein, 10 aa, Homo sapiens
  AACR GENIE Results; TP53_p.Y205H; B4001
VEHLDDRNTF

SEQ ID NO: 29261 - protein, 10 aa, Homo sapiens
  AACR GENIE Results; TP53_p.Y205H; B4402
VEHLDDRNTF

SEQ ID NO: 29262 - protein, 8 aa, Homo sapiens
  AACR GENIE Results; TP53_p.Y205H; C0802
HLDDRNTF

SEQ ID NO: 29263 - protein, 10 aa, Homo sapiens
  AACR GENIE Results; TP53_p.Y205H; A2301
VEHLDDRNTF

SEQ ID NO: 29264 - protein, 8 aa, Homo sapiens
  AACR GENIE Results; TP53_p.Y205H; C0401
HLDDRNTF

SEQ ID NO: 29265 - protein, 10 aa, Homo sapiens
  AACR GENIE Results; TP53_p.Y205H; A3001
VEHLDDRNTF

SEQ ID NO: 29266 - protein, 9 aa, Homo sapiens
  AACR GENIE Results; TP53_p.Y205H; B1402
EGNLRVEHL

SEQ ID NO: 29267 - protein, 9 aa, Homo sapiens
  AACR GENIE Results; TP53_p.Y205S; B0801
EGNLRVESL

SEQ ID NO: 29268 - protein, 9 aa, Homo sapiens
  AACR GENIE Results; TP53_p.Y205S; B1402
EGNLRVESL

SEQ ID NO: 29269 - protein, 10 aa, Homo sapiens
  AACR GENIE Results; TP53_p.Y205S; B4001
VEGNLRVESL

SEQ ID NO: 29270 - protein, 8 aa, Homo sapiens
  AACR GENIE Results; TP53_p.Y205S; C0501
SLDDRNTF

SEQ ID NO: 29271 - protein, 10 aa, Homo sapiens
  AACR GENIE Results; TP53_p.Y205S; B4403
VESLDDRNTF

SEQ ID NO: 29272 - protein, 9 aa, Homo sapiens
  AACR GENIE Results; TP53_p.Y205S; B5701
ESLDDRNTF

SEQ ID NO: 29273 - protein, 10 aa, Homo sapiens
  AACR GENIE Results; TP53_p.Y205S; B4001
VESLDDRNTF

SEQ ID NO: 29274 - protein, 8 aa, Homo sapiens
  AACR GENIE Results; TP53_p.Y205S; C0802
SLDDRNTF

SEQ ID NO: 29275 - protein, 9 aa, Homo sapiens
  AACR GENIE Results; TP53_p.Y205S; B0702
EGNLRVESL

SEQ ID NO: 29276 - protein, 10 aa, Homo sapiens
  AACR GENIE Results; TP53_p.Y205S; B4402
VESLDDRNTF

SEQ ID NO: 29277 - protein, 10 aa, Homo sapiens
  AACR GENIE Results; TP53_p.Y205S; A3001
VEGNLRVESL

SEQ ID NO: 29278 - protein, 9 aa, Homo sapiens
  AACR GENIE Results; TP53_p.Y205S; B3501
ESLDDRNTF

SEQ ID NO: 29279 - protein, 9 aa, Homo sapiens
  AACR GENIE Results; TP53_p.Y205S; A2601
ESLDDRNTF

SEQ ID NO: 29280 - protein, 10 aa, Homo sapiens
  AACR GENIE Results; TP53_p.Y205S; A2301
VESLDDRNTF

SEQ ID NO: 29281 - protein, 8 aa, Homo sapiens
  AACR GENIE Results; TP53_p.Y205S; C0401
SLDDRNTF

SEQ ID NO: 29282 - protein, 10 aa, Homo sapiens
  AACR GENIE Results; TP53_p.Y205S; A6801
ESLDDRNTFR

SEQ ID NO: 29283 - protein, 9 aa, Homo sapiens
  AACR GENIE Results; TP53_p.Y205S; B3801
ESLDDRNTF

SEQ ID NO: 29284 - protein, 9 aa, Homo sapiens
  AACR GENIE Results; TP53_p.Y205S; A2301
ESLDDRNTF

SEQ ID NO: 29285 - protein, 8 aa, Homo sapiens
  AACR GENIE Results; TP53_p.Y220C; B5101
VPCEPPEV

SEQ ID NO: 29286 - protein, 9 aa, Homo sapiens
  AACR GENIE Results; TP53_p.Y220C; A0206
VVPCEPPEV

SEQ ID NO: 29287 - protein, 10 aa, Homo sapiens
  AACR GENIE Results; TP53_p.Y220C; A0206
VVVPCEPPEV

SEQ ID NO: 29288 - protein, 10 aa, Homo sapiens
  AACR GENIE Results; TP53_p.Y220C; A0201
VVVPCEPPEV

SEQ ID NO: 29289 - protein, 8 aa, Homo sapiens
  AACR GENIE Results; TP53_p.Y220S; B5101
VPSEPPEV

SEQ ID NO: 29290 - protein, 9 aa, Homo sapiens
  AACR GENIE Results; TP53_p.Y220S; A0201
VVPSEPPEV

SEQ ID NO: 29291 - protein, 10 aa, Homo sapiens
  AACR GENIE Results; TP53_p.Y220S; A0201
VVVPSEPPEV

SEQ ID NO: 29292 - protein, 11 aa, Homo sapiens
  AACR GENIE Results; TP53_p.Y220S; A0201
SVVVPSEPPEV

SEQ ID NO: 29293 - protein, 9 aa, Homo sapiens
  AACR GENIE Results; TP53_p.Y234C; A3301
DCTTIHCNY

SEQ ID NO: 29294 - protein, 9 aa, Homo sapiens
  AACR GENIE Results; TP53_p.Y234C; A2601
DCTTIHCNY

SEQ ID NO: 29295 - protein, 9 aa, Homo sapiens
  AACR GENIE Results; TP53_p.Y234H; A2601
DCTTIHHNY

SEQ ID NO: 29296 - protein, 8 aa, Homo sapiens
  AACR GENIE Results; TP53_p.Y234H; C1601
CTTIHHNY

SEQ ID NO: 29297 - protein, 9 aa, Homo sapiens
  AACR GENIE Results; TP53_p.Y234H; A3301
DCTTIHHNY

SEQ ID NO: 29298 - protein, 8 aa, Homo sapiens
  AACR GENIE Results; TP53_p.Y234H; A3002
CTTIHHNY

SEQ ID NO: 29299 - protein, 9 aa, Homo sapiens
  AACR GENIE Results; TP53_p.Y234H; A6802
TTIHHNYMC

SEQ ID NO: 29300 - protein, 8 aa, Homo sapiens
  AACR GENIE Results; TP53_p.Y234H; A6802
TTIHHNYM

SEQ ID NO: 29301 - protein, 9 aa, Homo sapiens
  AACR GENIE Results; TP53_p.Y234H; B3501
DCTTIHHNY

SEQ ID NO: 29302 - protein, 9 aa, Homo sapiens
  AACR GENIE Results; TP53_p.Y234N; A2601
DCTTIHNNY

SEQ ID NO: 29303 - protein, 8 aa, Homo sapiens
  AACR GENIE Results; TP53_p.Y234N; C1601
CTTIHNNY

SEQ ID NO: 29304 - protein, 11 aa, Homo sapiens
  AACR GENIE Results; TP53_p.Y234N; A0101
GSDCTTIHNNY

SEQ ID NO: 29305 - protein, 9 aa, Homo sapiens
  AACR GENIE Results; TP53_p.Y234N; A6802
TTIHNNYMC

SEQ ID NO: 29306 - protein, 8 aa, Homo sapiens
  AACR GENIE Results; TRAF7_p.R84L; B5101
MPPISTPL

SEQ ID NO: 29307 - protein, 9 aa, Homo sapiens
  AACR GENIE Results; TSC1_p.R336W; B5701
QTLSSPSTW

SEQ ID NO: 29308 - protein, 9 aa, Homo sapiens
  AACR GENIE Results; TSC2_p.D1512N; B4001
NESNKPILL

SEQ ID NO: 29309 - protein, 9 aa, Homo sapiens
  AACR GENIE Results; TSC2_p.D1512N; B4403
NESNKPILL

SEQ ID NO: 29310 - protein, 8 aa, Homo sapiens
  AACR GENIE Results; TSC2_p.N1522S; B3501
LPSESQSF

SEQ ID NO: 29311 - protein, 9 aa, Homo sapiens
  AACR GENIE Results; TSC2_p.R1078Q; B0702
SVGTGTQSL

SEQ ID NO: 29312 - protein, 9 aa, Homo sapiens
  AACR GENIE Results; TSC2_p.R1706H; C0501
VSDHNLPFV

SEQ ID NO: 29313 - protein, 9 aa, Homo sapiens
  AACR GENIE Results; TSC2_p.R1706H; A0201
VSDHNLPFV

SEQ ID NO: 29314 - protein, 8 aa, Homo sapiens
  AACR GENIE Results; TSC2_p.R1706H; A3101
HNLPFVAR

SEQ ID NO: 29315 - protein, 9 aa, Homo sapiens
  AACR GENIE Results; TSC2_p.R1729H; B3501
MASQVHHSH

SEQ ID NO: 29316 - protein, 9 aa, Homo sapiens
  AACR GENIE Results; TSC2_p.T1070M; A0201
KLVTVMTSV

SEQ ID NO: 29317 - protein, 9 aa, Homo sapiens
  AACR GENIE Results; TSC2_p.T1070M; A0201
VMTSVGTGT

SEQ ID NO: 29318 - protein, 9 aa, Homo sapiens
  AACR GENIE Results; TSC2_p.T1070M; B1501
VGNKLVTVM

SEQ ID NO: 29319 - protein, 11 aa, Homo sapiens
  AACR GENIE Results; TSC2_p.T1070M; A1101
TVMTSVGTGTR

SEQ ID NO: 29320 - protein, 9 aa, Homo sapiens
  AACR GENIE Results; TSC2_p.T1070M; B0801
VGNKLVTVM

SEQ ID NO: 29321 - protein, 9 aa, Homo sapiens
  AACR GENIE Results; TSC2_p.V679M; B0702
GPAPAGPAM

SEQ ID NO: 29322 - protein, 9 aa, Homo sapiens
  AACR GENIE Results; TSC2_p.V679M; B0702
APAGPAMRL

SEQ ID NO: 29323 - protein, 9 aa, Homo sapiens
  AACR GENIE Results; TSC2_p.V679M; B3501
GPAPAGPAM

SEQ ID NO: 29324 - protein, 9 aa, Homo sapiens
  AACR GENIE Results; TSC2_p.V679M; B0702
GPAMRLGSV

SEQ ID NO: 29325 - protein, 10 aa, Homo sapiens
  AACR GENIE Results; XPO1_p.E571K; B5701
KTVVNKLFKF

SEQ ID NO: 29326 - protein, 9 aa, Homo sapiens
  AACR GENIE Results; XPO1_p.E571K; A2301
TVVNKLFKF

SEQ ID NO: 29327 - protein, 9 aa, Homo sapiens
  AACR GENIE Results; XPO1_p.E571K; A0301
KTVVNKLFK

SEQ ID NO: 29328 - protein, 9 aa, Homo sapiens
  AACR GENIE Results; XPO1_p.E571K; A1101
KTVVNKLFK

SEQ ID NO: 29329 - protein, 8 aa, Homo sapiens
  AACR GENIE Results; XPO1_p.E571K; A2301
VVNKLFKF

SEQ ID NO: 29330 - protein, 9 aa, Homo sapiens
  AACR GENIE Results; XPO1_p.E571K; B5701
TVVNKLFKF

SEQ ID NO: 29331 - protein, 9 aa, Homo sapiens
  AACR GENIE Results; XPO1_p.R261Q; B3503
VPMFQNVSL

SEQ ID NO: 29332 - protein, 9 aa, Homo sapiens
  AACR GENIE Results; XPO1_p.R261Q; B0702
VPMFQNVSL

SEQ ID NO: 29333 - protein, 9 aa, Homo sapiens
  AACR GENIE Results; XPO1_p.R261Q; B3501
VPMFQNVSL

SEQ ID NO: 29334 - protein, 9 aa, Homo sapiens
  AACR GENIE Results; XPO1_p.R261Q; B0801
VPMFQNVSL

SEQ ID NO: 29335 - protein, 10 aa, Homo sapiens
  AACR GENIE Results; XPO1_p.R261Q; C0102
NVPMFQNVSL

SEQ ID NO: 29336 - protein, 9 aa, Homo sapiens
  AACR GENIE Results; XPO1_p.R261Q; B5101
VPMFQNVSL

SEQ ID NO: 29337 - protein, 9 aa, Homo sapiens
  AACR GENIE Results; XPO1_p.R261Q; B5501
VPMFQNVSL

SEQ ID NO: 29338 - protein, 11 aa, Homo sapiens
  AACR GENIE Results; XPO1_p.R261Q; A6801
NVPMFQNVSLK

SEQ ID NO: 29339 - protein, 10 aa, Homo sapiens
  AACR GENIE Results; XPO1_p.R261Q; A6802
NVPMFQNVSL

SEQ ID NO: 29340 - protein, 11 aa, Homo sapiens
  AACR GENIE Results; XPO1_p.R261Q; B2702
NVPMFQNVSLK

SEQ ID NO: 29341 - protein, 10 aa, Homo sapiens
  AACR GENIE Results; XPO1_p.R261Q; A6801
VPMFQNVSLK

SEQ ID NO: 29342 - protein, 9 aa, Homo sapiens
  AACR GENIE Results; XPO1_p.R44I; B3801
YHGEGAQQI

SEQ ID NO: 29343 - protein, 9 aa, Homo sapiens
  AACR GENIE Results; XPO1_p.R44I; B1501
QQIMAQEVL

SEQ ID NO: 29344 - protein, 10 aa, Homo sapiens
  AACR GENIE Results; XPO1_p.R44I; B3801
YHGEGAQQIM

SEQ ID NO: 29345 - protein, 9 aa, Homo sapiens
  AACR GENIE Results; XPO1_p.R44I; A0301
IMAQEVLTH

SEQ ID NO: 29346 - protein, 9 aa, Homo sapiens
  AACR GENIE Results; XPO1_p.R44I; B1501
IMAQEVLTH

SEQ ID NO: 29347 - protein, 9 aa, Homo sapiens
  AACR GENIE Results; XPO1_p.R44I; B3801
QQIMAQEVL

SEQ ID NO: 29348 - protein, 9 aa, Homo sapiens
  AACR GENIE Results; XPO1_p.R44I; B3501
HGEGAQQIM

SEQ ID NO: 29349 - protein, 10 aa, Homo sapiens
  AACR GENIE Results; XPO1_p.R44I; A0201
IMAQEVLTHL

SEQ ID NO: 29350 - protein, 9 aa, Homo sapiens
  AACR GENIE Results; XPO1_p.R44I; B1501
AQQIMAQEV

SEQ ID NO: 29351 - protein, 8 aa, Homo sapiens
  AACR GENIE Results; XPO1_p.R44I; B1501
QQIMAQEV

SEQ ID NO: 29352 - protein, 9 aa, Homo sapiens
  AACR GENIE Results; XPO1_p.R749Q; B1402
MQTVKRETL

SEQ ID NO: 29353 - protein, 9 aa, Homo sapiens
  AACR GENIE Results; XPO1_p.R749Q; B2705
IRSMQTVKR

SEQ ID NO: 29354 - protein, 9 aa, Homo sapiens
  AACR GENIE Results; XPO1_p.R749Q; A1101
QTVKRETLK

SEQ ID NO: 29355 - protein, 8 aa, Homo sapiens
  AACR GENIE Results; XPO1_p.R749Q; B0801
QTVKRETL

SEQ ID NO: 29356 - protein, 9 aa, Homo sapiens
  AACR GENIE Results; XPO1_p.R749Q; B0801
MQTVKRETL

SEQ ID NO: 29357 - protein, 11 aa, Homo sapiens
  AACR GENIE Results; XPO1_p.R749Q; B0702
RSMQTVKRETL

SEQ ID NO: 29358 - RNA, 100 nt, Artificial Sequence
  Description of Artificial Sequence: Synthetic polynucleotide
  See specification as filed for detailed description of substitutions and preferred embodiments
aaaaaaaaaaaaaaaaaaaaaaaaaaaaaaaaaaaaaaaaaaaaaaaaaaaaaaaaaaaaaaaaaaaaaaaaaaaaaaaaaaaaaaaaaaaaaaaaaaaa

SEQ ID NO: 29359 - protein, 10 aa, Artificial Sequence
  Description of Artificial Sequence: Synthetic peptide
  MISC_FEATURE (1)..(10): This sequence may encompass 2-10 residues
  See specification as filed for detailed description of substitutions and preferred embodiments
GGGGGGGGGG

SEQ ID NO: 29360 - protein, 10 aa, Artificial Sequence
  Description of Artificial Sequence: Synthetic peptide
  MISC_FEATURE (1)..(10): This sequence may encompass 2-10 residues
  See specification as filed for detailed description of substitutions and preferred embodiments
AAAAAAAAAA

SEQ ID NO: 29361 - RNA, 90 nt, Artificial Sequence
  Description of Artificial Sequence: Synthetic oligonucleotide
  misc_feature (1)..(90): This sequence may encompass 20-90 nucleotides
  See specification as filed for detailed description of substitutions and preferred embodiments
aaaaaaaaaaaaaaaaaaaaaaaaaaaaaaaaaaaaaaaaaaaaaaaaaaaaaaaaaaaaaaaaaaaaaaaaaaaaaaaaaaaaaaaaaa

SEQ ID NO: 29362 - protein, 8 aa, Artificial Sequence
  Description of Artificial Sequence: Synthetic peptide
SIINFEKL

SEQ ID NO: 29363 - protein, 9 aa, Artificial Sequence
  Description of Artificial Sequence: Synthetic peptide
SPSYAYHQF

SEQ ID NO: 29364 - protein, 10 aa, Artificial Sequence
  Description of Artificial Sequence: Synthetic peptide
YVYVADVAAK

SEQ ID NO: 29365 - protein, 9 aa, Artificial Sequence
  Description of Artificial Sequence: Synthetic peptide
NLVPMVATV

SEQ ID NO: 29366 - protein, 9 aa, Artificial Sequence
  Description of Artificial Sequence: Synthetic peptide
CLGGLLTMV

SEQ ID NO: 29367 - protein, 9 aa, Artificial Sequence
  Description of Artificial Sequence: Synthetic peptide
GILGFVFTL

SEQ ID NO: 29368 - protein, 9 aa, Artificial Sequence
  Description of Artificial Sequence: Synthetic peptide
LLFGYPVYV

SEQ ID NO: 29369 - protein, 9 aa, Artificial Sequence
  Description of Artificial Sequence: Synthetic peptide
GLCTLVAML

SEQ ID NO: 29370 - protein, 9 aa, Artificial Sequence
  Description of Artificial Sequence: Synthetic peptide
WLSLLVPFV

SEQ ID NO: 29371 - protein, 8 aa, Artificial Sequence
  Description of Artificial Sequence: Synthetic peptide
FLLTRICT

SEQ ID NO: 29372 - protein, 8 aa, Artificial Sequence
  Description of Artificial Sequence: Synthetic peptide
WQAGILAR

SEQ ID NO: 29373 - protein, 8 aa, Artificial Sequence
  Description of Artificial Sequence: Synthetic peptide
QGQNLKYQ

SEQ ID NO: 29374 - protein, 25 aa, Artificial Sequence
  Description of Artificial Sequence: Synthetic peptide
WQAGILARNLVPMVATVQGQNLKYQ

SEQ ID NO: 29375 - protein, 8 aa, Artificial Sequence
  Description of Artificial Sequence: Synthetic peptide
SINNFEKL

SEQ ID NO: 29376 - DNA, 20 bp, Artificial Sequence
  Description of Artificial Sequence: Synthetic primer
gtggtgtgcagcgagaatag

SEQ ID NO: 29377 - DNA, 22 bp, Artificial Sequence
  Description of Artificial Sequence: Synthetic primer
cgctcgttgtagatgtcgttag

SEQ ID NO: 29378 - DNA, 15 bp, Artificial Sequence
  Description of Artificial Sequence: Synthetic probe
ttcatgcccgtgttg

SEQ ID NO: 29379 - DNA, 22 bp, Artificial Sequence
  Description of Artificial Sequence: Synthetic primer
gtttttgatccagacccagatg

SEQ ID NO: 29380 - DNA, 21 bp, Artificial Sequence
  Description of Artificial Sequence: Synthetic primer
gcccattattcagagcgagta

SEQ ID NO: 29381 - DNA, 14 bp, Artificial Sequence
  Description of Artificial Sequence: Synthetic probe
tcaccaggatccac

SEQ ID NO: 29382 - DNA, 17 bp, Artificial Sequence
  Description of Artificial Sequence: Synthetic primer
ccttgcacatgccggag

SEQ ID NO: 29383 - DNA, 17 bp, Artificial Sequence
  Description of Artificial Sequence: Synthetic primer
acagagcctcgcctttg

SEQ ID NO: 29384 - DNA, 12 bp, Artificial Sequence
  Description of Artificial Sequence: Synthetic probe
gtgagctggcgg

SEQ ID NO: 29385 - DNA, 22 bp, Artificial Sequence
  Description of Artificial Sequence: Synthetic primer
ctgaaagctcggtttgctaatg

SEQ ID NO: 29386 - DNA, 21 bp, Artificial Sequence
  Description of Artificial Sequence: Synthetic primer
ccatgctggaagagacaatct

SEQ ID NO: 29387 - DNA, 15 bp, Artificial Sequence
  Description of Artificial Sequence: Synthetic probe
tggcgctgaccgata

SEQ ID NO: 29388 - DNA, 22 bp, Artificial Sequence
  Description of Artificial Sequence: Synthetic primer
tatgcctatcctgtctcctctg

SEQ ID NO: 29389 - DNA, 22 bp, Artificial Sequence
  Description of Artificial Sequence: Synthetic primer
gctaatgcagctaagtcctctc

SEQ ID NO: 29390 - DNA, 15 bp, Artificial Sequence
  Description of Artificial Sequence: Synthetic probe
tgaccgtgccttctg

SEQ ID NO: 29391 - protein, 9 aa, Artificial Sequence
  Description of Artificial Sequence: Synthetic peptide
SPSYVYHQF

SEQ ID NO: 29392 - protein, 10 aa, Homo sapiens
TTAPPLSGKG

SEQ ID NO: 29393 - protein, 9 aa, Homo sapiens
TTAPPLSGK

SEQ ID NO: 29394 - protein, 11 aa, Homo sapiens
VVVGAAGVGKS

SEQ ID NO: 29395 - protein, 10 aa, Homo sapiens
KLVVVGACGV

SEQ ID NO: 29396 - protein, 9 aa, Homo sapiens
VVGADGVGK

SEQ ID NO: 29397 - protein, 10 aa, Homo sapiens
VVVGADGVGK

SEQ ID NO: 29398 - protein, 10 aa, Homo sapiens
VVVGAVGVGK

SEQ ID NO: 29399 - protein, 9 aa, Homo sapiens
VVGAVGVGK

SEQ ID NO: 29400 - protein, 9 aa, Homo sapiens
AVGVGKSAL

SEQ ID NO: 29401 - protein, 10 aa, Homo sapiens
TYSPALNNMF

SEQ ID NO: 29402 - protein, 9 aa, Artificial Sequence
  Description of Artificial Sequence: Synthetic peptide
NTDNNLAVY

SEQ ID NO: 29403 - protein, 9 aa, Artificial Sequence
  Description of Artificial Sequence: Synthetic peptide
EVDPIGHVY

SEQ ID NO: 29404 - protein, 9 aa, Artificial Sequence
  Description of Artificial Sequence: Synthetic peptide
LLASSILCA

SEQ ID NO: 29405 - protein, 10 aa, Artificial Sequence
  Description of Artificial Sequence: Synthetic peptide
AIFPGAVPAA

SEQ ID NO: 29406 - protein, 9 aa, Artificial Sequence
  Description of Artificial Sequence: Synthetic peptide
VYDLSRDIL

SEQ ID NO: 29407 - protein, 10 aa, Artificial Sequence
  Description of Artificial Sequence: Synthetic peptide
ASSLPTTMNY

SEQ ID NO: 29408 - protein, 13 aa, Artificial Sequence
  Description of Artificial Sequence: Synthetic peptide
PKYVKQNTLKLAT

SEQ ID NO: 29409 - protein, 14 aa, Artificial Sequence
  Description of Artificial Sequence: Synthetic peptide
LPLKMLNIPSINVH

SEQ ID NO: 29410 - protein, 15 aa, Artificial Sequence
  Description of Artificial Sequence: Synthetic peptide
PEQWMFQGAPPSQGT

SEQ ID NO: 29411 - protein, 15 aa, Artificial Sequence
  Description of Artificial Sequence: Synthetic peptide
EHPTFTSQYRIQGKL

SEQ ID NO: 29412 - protein, 25 aa, Artificial Sequence
  Description of Artificial Sequence: Synthetic peptide
PILSPLTKGILGFVFTLTVPSERGL

SEQ ID NO: 29413 - protein, 25 aa, Artificial Sequence
  Description of Artificial Sequence: Synthetic peptide
HFPGFGQSLLFGYPVYVFGDCVQGD

SEQ ID NO: 29414 - protein, 25 aa, Artificial Sequence
  Description of Artificial Sequence: Synthetic peptide
RMQAIQNAGLCTLVAMLEETIFWLQ

SEQ ID NO: 29415 - protein, 25 aa, Artificial Sequence
  Description of Artificial Sequence: Synthetic peptide
RTYGPVFMCLGGLLTMVAGAVWLTV

SEQ ID NO: 29416 - protein, 25 aa, Artificial Sequence
  Description of Artificial Sequence: Synthetic peptide
SSSGLINSNTDNNLAVYDLSRDILN

SEQ ID NO: 29417 - protein, 25 aa, Artificial Sequence
  Description of Artificial Sequence: Synthetic peptide
LVFGIELMEVDPIGHVYIFATCLGL

SEQ ID NO: 29418 - protein, 25 aa, Artificial Sequence
  Description of Artificial Sequence: Synthetic peptide
MNFYLLLASSILCALIVFWKYRRFQ

SEQ ID NO: 29419 - protein, 25 aa, Artificial Sequence
  Description of Artificial Sequence: Synthetic peptide
AAAAAAAAIFPGAVPAARPPYPGAV

SEQ ID NO: 29420 - protein, 25 aa, Artificial Sequence
  Description of Artificial Sequence: Synthetic peptide
SNTDNNLAVYDLSRDILNNFPHSIA

SEQ ID NO: 29421 - protein, 25 aa, Artificial Sequence
  Description of Artificial Sequence: Synthetic peptide
DPPQSPQGASSLPTTMNYPLWSQSY

SEQ ID NO: 29422 - protein, 25 aa, Artificial Sequence
  Description of Artificial Sequence: Synthetic peptide
ITYGACPKYVKQNTLKLATGMRNVP

SEQ ID NO: 29423 - protein, 25 aa, Artificial Sequence
  Description of Artificial Sequence: Synthetic peptide
SIYVYALPLKMLNIPSINVHHYPSA

SEQ ID NO: 29424 - protein, 25 aa, Artificial Sequence
  Description of Artificial Sequence: Synthetic peptide
EGPWVPEQWMFQGAPPSQGTDVVQH

SEQ ID NO: 29425 - protein, 25 aa, Artificial Sequence
  Description of Artificial Sequence: Synthetic peptide
RGPQYSEHPTFTSQYRIQGKLEYRH

SEQ ID NO: 29426 - protein, 9 aa, Artificial Sequence
  Description of Artificial Sequence: Synthetic peptide
CTPYDINQM

SEQ ID NO: 29427 - protein, 8 aa, Artificial Sequence
  Description of Artificial Sequence: Synthetic peptide
TTPESANL

SEQ ID NO: 29428 - protein, 9 aa, Artificial Sequence
  Description of Artificial Sequence: Synthetic peptide
CAPPGYALL

SEQ ID NO: 29429 - protein, 9 aa, Artificial Sequence
  Description of Artificial Sequence: Synthetic peptide
SGPKTNIIV

SEQ ID NO: 29430 - protein, 9 aa, Artificial Sequence
  Description of Artificial Sequence: Synthetic peptide
LSPRTLNAW

SEQ ID NO: 29431 - protein, 9 aa, Artificial Sequence
  Description of Artificial Sequence: Synthetic peptide
TVPWPNASL

SEQ ID NO: 29432 - protein, 15 aa, Artificial Sequence
  Description of Artificial Sequence: Synthetic peptide
PNGTHSWEYWGAQLN

SEQ ID NO: 29433 - protein, 13 aa, Artificial Sequence
  Description of Artificial Sequence: Synthetic peptide
YKYKVVKIEPLGV

SEQ ID NO: 29434 - protein, 15 aa, Artificial Sequence
  Description of Artificial Sequence: Synthetic peptide
TEEAKQIVQRHLVVE

SEQ ID NO: 29435 - protein, 13 aa, Artificial Sequence
  Description of Artificial Sequence: Synthetic peptide
AGSLQGQWRGAAG

SEQ ID NO: 29436 - protein, 16 aa, Artificial Sequence
  Description of Artificial Sequence: Synthetic peptide
EISTNIRQAGVQYSRA

SEQ ID NO: 29437 - protein, 9 aa, Artificial Sequence
  Description of Artificial Sequence: Synthetic peptide
RPKQAWCWF

SEQ ID NO: 29438 - protein, 9 aa, Artificial Sequence
  Description of Artificial Sequence: Synthetic peptide
RPKVPLRTM

SEQ ID NO: 29439 - protein, 9 aa, Artificial Sequence
  Description of Artificial Sequence: Synthetic peptide
GPRKPIKCW

SEQ ID NO: 29440 - protein, 9 aa, Artificial Sequence
  Description of Artificial Sequence: Synthetic peptide
LNMADKKET

SEQ ID NO: 29441 - protein, 25 aa, Artificial Sequence
  Description of Artificial Sequence: Synthetic peptide
MFQALSEGCTPYDINQMLNVLGDHQ

SEQ ID NO: 29442 - protein, 25 aa, Artificial Sequence
  Description of Artificial Sequence: Synthetic peptide
SCISEADATTPESANLGEEILSQLY

SEQ ID NO: 29443 - protein, 25 aa, Artificial Sequence
  Description of Artificial Sequence: Synthetic peptide
WDAIRFRYCAPPGYALLRCNDTNYS

SEQ ID NO: 29444 - protein, 25 aa, Artificial Sequence
  Description of Artificial Sequence: Synthetic peptide
AFLMALTDSGPKTNIIVDSQYVMGI

SEQ ID NO: 29445 - protein, 25 aa, Artificial Sequence
  Description of Artificial Sequence: Synthetic peptide
GNVWVHTPLSPRTLNAWVKAVEEKK

SEQ ID NO: 29446 - protein, 25 aa, Artificial Sequence
  Description of Artificial Sequence: Synthetic peptide
AFRQVCHTTVPWPNASLTPKWNNET

SEQ ID NO: 29447 - protein, 25 aa, Artificial Sequence
  Description of Artificial Sequence: Synthetic peptide
VFNFPPNGTHSWEYWGAQLNAMKGD

SEQ ID NO: 29448 - protein, 25 aa, Artificial Sequence
  Description of Artificial Sequence: Synthetic peptide
NWRSELYKYKVVKIEPLGVAPTKAK

SEQ ID NO: 29449 - protein, 25 aa, Artificial Sequence
  Description of Artificial Sequence: Synthetic peptide
EKVKHTEEAKQIVQRHLVVETGTTE

SEQ ID NO: 29450 - protein, 25 aa, Artificial Sequence
  Description of Artificial Sequence: Synthetic peptide
DQVESTAGSLQGQWRGAAGTAAQAA

SEQ ID NO: 29451 - protein, 25 aa, Artificial Sequence
  Description of Artificial Sequence: Synthetic peptide
QELDEISTNIRQAGVQYSRADEEQQ

SEQ ID NO: 29452 - protein, 25 aa, Artificial Sequence
  Description of Artificial Sequence: Synthetic peptide
FHSQPINERPKQAWCWFGGSWKEAI

SEQ ID NO: 29453 - protein, 25 aa, Artificial Sequence
  Description of Artificial Sequence: Synthetic peptide
DDIDEEDDDLVGVSVRPKVPLRTMS

SEQ ID NO: 29454 - protein, 25 aa, Artificial Sequence
  Description of Artificial Sequence: Synthetic peptide
PFAAAQQRGPRKPIKCWNCGKEGHS

SEQ ID NO: 29455 - protein, 25 aa, Artificial Sequence
  Description of Artificial Sequence: Synthetic peptide
RRLTARGLLNMADKKETRTPKKAKA

SEQ ID NO: 29456 - protein, 9 aa, Artificial Sequence
  Description of Artificial Sequence: Synthetic peptide
EGPRNQDWL

SEQ ID NO: 29457 - protein, 9 aa, Artificial Sequence
  Description of Artificial Sequence: Synthetic peptide
TAPDNLGYM

SEQ ID NO: 29458 - protein, 9 aa, Artificial Sequence
  Description of Artificial Sequence: Synthetic peptide
SVYDFFVWL

SEQ ID NO: 29459 - protein, 9 aa, Artificial Sequence
  Description of Artificial Sequence: Synthetic peptide
MNKYAYHML

SEQ ID NO: 29460 - protein, 8 aa, Artificial Sequence
  Description of Artificial Sequence: Synthetic peptide
SIIVFNLL

SEQ ID NO: 29461 - protein, 9 aa, Artificial Sequence
  Description of Artificial Sequence: Synthetic peptide
ASMTNMELM

SEQ ID NO: 29462 - protein, 9 aa, Artificial Sequence
  Description of Artificial Sequence: Synthetic peptide
AQLANDVVL

SEQ ID NO: 29463 - protein, 9 aa, Artificial Sequence
  Description of Artificial Sequence: Synthetic peptide
LPYLGWLVF

SEQ ID NO: 29464 - protein, 10 aa, Artificial Sequence
  Description of Artificial Sequence: Synthetic peptide
GYCGLRGTGV

SEQ ID NO: 29465 - protein, 8 aa, Artificial Sequence
  Description of Artificial Sequence: Synthetic peptide
LSIFKHKL

SEQ ID NO: 29466 - protein, 8 aa, Artificial Sequence
  Description of Artificial Sequence: Synthetic peptide
LIWIPALL

SEQ ID NO: 29467 - protein, 9 aa, Artificial Sequence
  Description of Artificial Sequence: Synthetic peptide
SSGHNECPV

SEQ ID NO: 29468 - protein, 9 aa, Artificial Sequence
  Description of Artificial Sequence: Synthetic peptide
GQKMNAQAI

SEQ ID NO: 29469 - protein, 17 aa, Artificial Sequence
  Description of Artificial Sequence: Synthetic peptide
ISQAVHAAHAEINEAGR

SEQ ID NO: 29470 - protein, 19 aa, Artificial Sequence
  Description of Artificial Sequence: Synthetic peptide
MTEQQWNFAGIEAAASAIQ

SEQ ID NO: 29471 - protein, 20 aa, Artificial Sequence
  Description of Artificial Sequence: Synthetic peptide
FNNFTVSFWLRVPKVSASHL

SEQ ID NO: 29472 - protein, 15 aa, Artificial Sequence
  Description of Artificial Sequence: Synthetic peptide
DGSTDYGILQINSRW

SEQ ID NO: 29473 - protein, 19 aa, Artificial Sequence
  Description of Artificial Sequence: Synthetic peptide
MEVGWYRSPFSRVVHLYRN

SEQ ID NO: 29474 - protein, 25 aa, Artificial Sequence
  Description of Artificial Sequence: Synthetic peptide
VSGLEQLESIINFEKLTEWTSSNVM

SEQ ID NO: 29475 - protein, 25 aa, Artificial Sequence
  Description of Artificial Sequence: Synthetic peptide
ALLAVGALEGPRNQDWLGVPRQLVT

SEQ ID NO: 29476 - protein, 25 aa, Artificial Sequence
  Description of Artificial Sequence: Synthetic peptide
VTNTEMFVTAPDNLGYMYEVQWPGQ

SEQ ID NO: 29477 - protein, 25 aa, Artificial Sequence
  Description of Artificial Sequence: Synthetic peptide
TQPQIANCSVYDFFVWLHYYSVRDT

SEQ ID NO: 29478 - protein, 25 aa, Artificial Sequence
  Description of Artificial Sequence: Synthetic peptide
LWPRVTYHSPSYAYHQFERRAKYKR

SEQ ID NO: 29479 - protein, 25 aa, Artificial Sequence
  Description of Artificial Sequence: Synthetic peptide
LWPRVTYHMNKYAYHMLERRAKYKR

SEQ ID NO: 29480 - protein, 25 aa, Artificial Sequence
  Description of Artificial Sequence: Synthetic peptide
GQSLVISASIIVFNLLELEGDYRDD

SEQ ID NO: 29481 - protein, 25 aa, Artificial Sequence
  Description of Artificial Sequence: Synthetic peptide
GIPVHLELASMTNMELMSSIVHQQV

SEQ ID NO: 29482 - protein, 25 aa, Artificial Sequence
  Description of Artificial Sequence: Synthetic peptide
RVLELFRAAQLANDVVLQIMELCGA

SEQ ID NO: 29483 - protein, 25 aa, Artificial Sequence
  Description of Artificial Sequence: Synthetic peptide
HRYSLEEILPYLGWLVFAVVTTSFL

SEQ ID NO: 29484 - protein, 25 aa, Artificial Sequence
  Description of Artificial Sequence: Synthetic peptide
YLSKNPDGYCGLRGTGVSCPMAIKK

SEQ ID NO: 29485 - protein, 25 aa, Artificial Sequence
  Description of Artificial Sequence: Synthetic peptide
NEIPFTYEQLSIFKHKLDKTYPQGY

SEQ ID NO: 29486 - protein, 25 aa, Artificial Sequence
  Description of Artificial Sequence: Synthetic peptide
SRASLLGPGFVLIWIPALLPALRLS

SEQ ID NO: 29487 - protein, 25 aa, Artificial Sequence
  Description of Artificial Sequence: Synthetic peptide
NWHKGWNWSSGHNECPVGASCHPFT

SEQ ID NO: 29488 - protein, 25 aa, Artificial Sequence
  Description of Artificial Sequence: Synthetic peptide
KTLLKVSKGQKMNAQAIALVACYLR

SEQ ID NO: 29489 - protein, 25 aa, Artificial Sequence
  Description of Artificial Sequence: Synthetic peptide
ESLKISQAVHAAHAEINEAGREVVG

SEQ ID NO: 29490 - protein, 25 aa, Artificial Sequence
  Description of Artificial Sequence: Synthetic peptide
MTEQQWNFAGIEAAASAIQGNVTSI

SEQ ID NO: 29491 - protein, 25 aa, Artificial Sequence
  Description of Artificial Sequence: Synthetic peptide
DMFNNFTVSFWLRVPKVSASHLEQY

SEQ ID NO: 29492 - protein, 25 aa, Artificial Sequence
  Description of Artificial Sequence: Synthetic peptide
TNRNTDGSTDYGILQINSRWWCNDG

SEQ ID NO: 29493 - protein, 25 aa, Artificial Sequence
  Description of Artificial Sequence: Synthetic peptide
TGMEVGWYRSPFSRVVHLYRNGKDQ

SEQ ID NO: 29494 - protein, 13 aa, Artificial Sequence
  Description of Artificial Sequence: Synthetic peptide
AKFVAAWTLKAAA

SEQ ID NO: 29495 - protein, 14 aa, Artificial Sequence
  Description of Artificial Sequence: Synthetic peptide
QYIKANSKFIGITE

SEQ ID NO: 29496 - protein, 9 aa, Artificial Sequence
  Description of Artificial Sequence: Synthetic peptide
DLMGYIPAV

SEQ ID NO: 29497 - protein, 10 aa, Artificial Sequence
  Description of Artificial Sequence: Synthetic peptide
FLPSDFFPSV

SEQ ID NO: 29498 - protein, 9 aa, Artificial Sequence
  Description of Artificial Sequence: Synthetic peptide
FLLTRILTI

SEQ ID NO: 29499 - protein, 9 aa, Artificial Sequence
  Description of Artificial Sequence: Synthetic peptide
FLLSLGIHL

SEQ ID NO: 29500 - protein, 9 aa, Artificial Sequence
  Description of Artificial Sequence: Synthetic peptide
ILKEPVHGV

SEQ ID NO: 29501 - protein, 10 aa, Artificial Sequence
  Description of Artificial Sequence: Synthetic peptide
YMLDLQPETT

SEQ ID NO: 29502 - protein, 9 aa, Artificial Sequence
  Description of Artificial Sequence: Synthetic peptide
CINGVCWTV

SEQ ID NO: 29503 - protein, 10 aa, Artificial Sequence
  Description of Artificial Sequence: Synthetic peptide
YLLPRRGPRL

SEQ ID NO: 29504 - protein, 9 aa, Artificial Sequence
  Description of Artificial Sequence: Synthetic peptide
FLYALALLL

SEQ ID NO: 29505 - protein, 9 aa, Artificial Sequence
  Description of Artificial Sequence: Synthetic peptide
AAGIGILTV

SEQ ID NO: 29506 - protein, 9 aa, Artificial Sequence
  Description of Artificial Sequence: Synthetic peptide
SLLMWITQV

SEQ ID NO: 29507 - protein, 9 aa, Artificial Sequence
  Description of Artificial Sequence: Synthetic peptide
KLGGALQAK

SEQ ID NO: 29508 - protein, 9 aa, Artificial Sequence
  Description of Artificial Sequence: Synthetic peptide
RLRAEAQVK

SEQ ID NO: 29509 - protein, 10 aa, Artificial Sequence
  Description of Artificial Sequence: Synthetic peptide
EENLLDFVRF

SEQ ID NO: 29510 - protein, 9 aa, Artificial Sequence
  Description of Artificial Sequence: Synthetic peptide
EEYLQAFTY

SEQ ID NO: 29511 - protein, 9 aa, Artificial Sequence
  Description of Artificial Sequence: Synthetic peptide
DWENVSPEL

SEQ ID NO: 29512 - protein, 15 aa, Artificial Sequence
  Description of Artificial Sequence: Synthetic peptide
QYIKANSKFIGITEL
